(19) United States
(12) Patent Application Publication
(10) Pub. No.: US 2013/0288895 A1
(43) Pub. Date: Oct. 31, 2013

(54) METHODS AND COMPOSITIONS FOR WEED CONTROL

(71) Applicants: Daniel Ader, Louis, MO (US); Zhaolong Li, St. Charles, MO (US); Ronak Hasmukh Shah, Chesterfield, MO (US); Mengbing Tao, O'Fallon, MO (US); Dafu Wang, Chesterfield, MO (US); Heping Yang, Chesterfield, MO (US)

(72) Inventors: Daniel Ader, Louis, MO (US); Zhaolong Li, St. Charles, MO (US); Ronak Hasmukh Shah, Chesterfield, MO (US); Mengbing Tao, O'Fallon, MO (US); Dafu Wang, Chesterfield, MO (US); Heping Yang, Chesterfield, MO (US)

(21) Appl. No.: 13/612,925

(22) Filed: Sep. 13, 2012

Related U.S. Application Data
(60) Provisional application No. 61/534,057, filed on Sep. 13, 2011.

(51) Int. Cl. C12N 15/11

(52) U.S. Cl. CPC C12N 15/11
USPC 504/127; 800/278; 504/324; 504/323; 504/239; 504/206; 435/320.1; 435/91.1; 435/6.1; 536/23.1

(57) ABSTRACT

Provided are novel compositions for use in herbicide activity. Specifically, methods and compositions that modulate 5-enolpyruvylshikimate-3-phosphate synthase in plant species. The present invention also provides for combinations of compositions and methods that enhance weed control.

[0001] This application claims benefit under 35USC §119(e) of U.S. provisional application Ser. No. 61/534,057 filed Sep. 13, 2011, herein incorporated by reference in it's entirety. The sequence listing that is contained in the file named “40_{—}21(58634)B seq listing.txt”, which is 1,722,262 bytes (measured in operating system MS-Windows) and was created on 7 Sep. 2012, is filed herewith and incorporated herein by reference.

### FIELD

[0002] The methods and compositions generally relates to the field of weed management. More specifically, relates to 5-enolpyruvylshikimate-3-phosphate synthase genes in plants and compositions containing polynucleotide molecules for modulating and/or regulating their expression. Further provided are methods and compositions useful for weed control.

### BACKGROUND

[0003] Weeds are plants that compete with cultivated plants in an agronomic environment and cost farmers billions of dollars annually in crop losses and the expense of efforts to keep weeds under control. Weeds also serve as hosts for crop diseases and insect pests. The losses caused by weeds in agricultural production environments include decreases in crop yield, reduced crop quality, increased irrigation costs, increased harvesting costs, reduced land value, injury to livestock, and crop damage from insects and diseases harbored by the weeds. The principal means by which weeds cause these effects are: 1) competing with crop plants for water, nutrients, sunlight and other essentials for growth and development, 2) production of toxic or irritant chemicals that cause human or animal health problem, 3) production of immense quantities of seed or vegetative reproductive parts or both that contaminate agricultural products and perpetuate the species in agricultural lands, and 4) production on agricultural and nonagricultural lands of vast amounts of vegetation that must be disposed of. Herbicide tolerant weeds are a problem with nearly all herbicides in use, there is a need to effectively manage these weeds. There are over 365 weed biotypes currently identified as being herbicide resistant to one or more herbicides by the Herbicide Resistance Action Committee (HRAC), the North American Herbicide Resistance Action Committee (NAHRAC), and the Weed Science Society of America (WSSA).

[0004] The EPSPS (5-enolpyruvylshikimate-3-phosphate synthase) enzyme catalyzes the conversion of shikimate-3-phosphate into 5-enolpyruvyl-shikimate-3-phosphate, an intermediate in the biochemical pathway for creating three essential aromatic amino acids (tyrosine, phenylalanine, and tryptophan). The EPSPS enzyme is the target for the herbicide N-phosphonomethyl glycine also known as glyphosate.

### SUMMARY

[0005] In one aspect, the invention provides a method of plant control comprising an external application to a plant or plant part a composition comprising a polynucleotide and a transfer agent, wherein the polynucleotide is essentially identical or essentially complementary to an EPSPS gene sequence or fragment thereof, or to the RNA transcript of said EPSPS gene sequence or fragment thereof, wherein said EPSPS gene sequence is selected from the group consisting of SEQ ID NO:1-120 or a polynucleotide fragment thereof. As a result of such application, the plant growth or development or reproductive ability is reduced or the plant is made more sensitive to an EPSPS inhibitor herbicide relative to a plant not treated with said composition. In this manner, plants that have become resistant to the application of glyphosate containing herbicides are made more susceptible to the herbicidal effects of a glyphosate containing herbicide, thus potentiating the effect of the herbicide. The polynucleotide fragment is at least 18 contiguous nucleotides, at least 19 contiguous nucleotides, at least 20 contiguous nucleotides or at least 21 contiguous nucleotides in length and at least 85 percent identical to an EPSPS gene sequence selected from the group consisting of SEQ ID NO:1-120 and the transfer agent comprises an organosilicone composition or compound. The polynucleotide fragment can be sense or anti-sense ssDNA or ssRNA, dsRNA, or dsDNA, or dsDNA/RNA hybrids. The composition can include various components that include more than one polynucleotide fragments, an EPSPS inhibitor herbicide and/or other herbicides that enhance the plant control activity of the composition.

[0006] In another aspect, polynucleotide molecules and methods for modulating EPSPS gene expression in a plant species are provided. The method reduces, represses or otherwise delays expression of an EPSPS gene in a plant comprising an external application to such plant of a composition comprising a polynucleotide and a transfer agent, wherein the polynucleotide is essentially identical or essentially complementary to an EPSPS gene sequence or fragment thereof, or to the RNA transcript of the EPSPS gene sequence or fragment thereof, wherein the EPSPS gene sequence is selected from the group consisting of SEQ ID NO:1-120 or a polynucleotide fragment thereof. The polynucleotide fragment is at least 18 contiguous nucleotides, at least 19 contiguous nucleotides, at least 20 contiguous nucleotides or at least 21 contiguous nucleotides in length and at least 85 percent identical to an EPSPS gene sequence selected from the group consisting of SEQ ID NO:1-120 and the transfer agent is an organosilicone compound. The polynucleotide fragment can be sense or anti-sense ssDNA or ssRNA, dsRNA, or dsDNA, or dsDNA/RNA hybrids.

[0007] In a further aspect, the polynucleotide molecule composition may be combined with other herbicidal (co-herbicides) compounds to provide additional control of unwanted plants in a field of cultivated plants.

[0008] In a further aspect, the polynucleotide molecule composition may be combined with any one or more additional agricultural chemicals, such as, insecticides, fungicides, nematocides, bactericides, acaricides, growth regulators, chemosterilants, semiochemicals, repellents, attractants, pheromones, feeding stimulants, biopesticides, microbial pesticides or other biologically active compounds to form a multi-component pesticide giving an even broader spectrum of agricultural protection.

### BRIEF DESCRIPTION OF THE FIGURES

[0009] The following drawings form part of the present specification and are included to further demonstrate certain aspects of the function of the compositions and method. The function may be better understood by reference to one or more of these drawings in combination with the detailed description of specific embodiments presented herein. The function can be more fully understood from the following description of the figures:

[0010] FIG. 1. Regions of the Palmer amaranth EPSPS coding sequence that are sensitive to trigger molecules

[0011] FIG. 2. Transgenic glyphosate tolerant corn plants treated with trigger polynucleotides and glyphosate

[0012] FIG. 3. Transgenic cotton plants treated with trigger polynucleotides and glyphosate

### DETAILED DESCRIPTION

[0013] Provided are methods and compositions containing a polynucleotide that provide for regulation, repression or delay and/or modulation of EPSPS (5-enolpyruvylshikimate-3-phosphate synthase) gene expression and enhanced control of weedy plant species and importantly glyphosate resistant weed biotypes. Aspects of the method can be applied to manage various weedy plants in agronomic and other cultivated environments.

[0014] The following definitions and methods are provided to guide those of ordinary skill in the art. Unless otherwise noted, terms are to be understood according to conventional usage by those of ordinary skill in the relevant art. Where a term is provided in the singular, the inventors also contemplate aspects described by the plural of that term.

[0015] By “non-transcribable” polynucleotides is meant that the polynucleotides do not comprise a complete polymerase II transcription unit.

[0016] As used herein “solution” refers to homogeneous mixtures and non-homogeneous mixtures such as suspensions, colloids, micelles, and emulsions.

[0017] Weedy plants are plants that compete with cultivated plants, those of particular importance include, but are not limited to important invasive and noxious weeds and herbicide resistant biotypes in crop production, such as, Amaranthus species—A. albus, A. blitoides, A. hybridus, A. palmeri, A. powellii, A. retroflexus, A. spinosus, A. tuberculatus, and A. viridis; Ambrosia species—A. trifida, A. artemisifolia; Lolium species—L. multiflorum, L. rigidium, L perenne; Digitaria species—D. insularis; Euphorbia species—E. heterophylla; Kochia species—K. scoparia; Sorghum species—S. halepense; Conyza species—C. bonariensis, C. canadensis, C. sumatrensis; Chloris species—C. truncate; Echinochola species—E. colona, E. crus-galli; Eleusine species—E. indica; Poa species—P. annua; Plantago species—P. lanceolata; Avena species—A. fatua; Chenopodium species—C. album; Setaria species—S. viridis, Abutilon theophrasti, Ipomoea species, Sesbania, species, Cassia species, Sida species, Brachiaria, species and Solanum species.

[0018] Additional weedy plant species found in cultivated areas include Alopecurus myosuroides, Avena sterilis, Avena sterilis ludoviciana, Brachiaria plantaginea, Bromus diandrus, Bromus rigidus, Cynosurus echinatus, Digitaria ciliaris, Digitaria ischaemum, Digitaria sanguinalis, Echinochloa oryzicola, Echinochloa phyllopogon, Eriochloa punctata, Hordeum glaucum, Hordeum leporinum, Ischaemum rugosum, Leptochloa chinensis, Lolium persicum, Phalaris minor, Phalaris paradoxa, Rottboellia exalta, Setaria faberi, Setaria viridis var, robusta-alba schreiber, Setaria viridis var, robusta-purpurea, Snowdenia polystachea, Sorghum sudanese, Alisma plantago-aquatica, Amaranthus lividus, Amaranthus quitensis, Ammania auriculata, Ammania coccinea, Anthemis cotula, Apera spica-venti, Bacopa rotundifolia, Bidens pilosa, Bidens subalternans, Brassica tournefortii, Bromus tectorum, Camelina microcarpa, Chrysanthemum coronarium, Cuscuta campestris, Cyperus difformis, Damasonium minus, Descurainia sophia, Diplotaxis tenuifolia, Echium plantagineum, Elatine triandra var, pedicellate, Euphorbia heterophylla, Fallopia convolvulus, Fimbristylis miliacea, Galeopsis tetrahit, Galium spurium, Helianthus annuus, Iva xanthifolia, Ixophorus unisetus, Ipomoea indica, Ipomoea purpurea, Ipomoea sepiaria, Ipomoea aquatic, Ipomoea triloba, Lactuca serriola, Limnocharis flava, Limnophila erecta, Limnophila sessiliflora, Lindernia dubia, Lindernia dubia var, major, Lindernia micrantha, Lindernia procumbens, Mesembryanthemum crystallinum, Monochoria korsakowii, Monochoria vaginalis, Neslia paniculata, Papaver rhoeas, Parthenium hysterophorus, Pentzia suffruticosa, Phalaris minor, Raphanus raphanistrum, Raphanus sativus, Rapistrum rugosum, Rotala indica var, uliginosa, Sagittaria guyanensis, Sagittaria montevidensis, Sagittaria pygmaea, Salsola iberica, Scirpus juncoides var, ohwianus, Scirpus mucronatus, Setaria lutescens, Sida spinosa, Sinapis arvensis, Sisymbrium orientale, Sisymbrium thellungii, Solanum ptycanthum, Sonchus aspen, Sonchus oleraceus, Sorghum bicolor, Stellaria media, Thlaspi arvense, Xanthium strumarium, Arctotheca calendula, Conyza sumatrensis, Crassocephalum crepidiodes, Cuphea carthagenenis, Epilobium adenocaulon, Erigeron philadelphicus, Landoltia punctata, Lepidium virginicum, Monochoria korsakowii, Solanum americanum, Solanum nigrum, Vulpia bromoides, Youngia japonica, Hydrilla verticillata, Carduus nutans, Carduus pycnocephalus, Centaurea solstitialis, Cirsium arvense, Commelina diffusa, Convolvulus arvensis, Daucus carota, Digitaria ischaemum, Echinochloa crus-pavonis, Fimbristylis miliacea, Galeopsis tetrahit, Galium spurium, Limnophila erecta, Matricaria perforate, Papaver rhoeas, Ranunculus acris, Soliva sessilis, Sphenoclea zeylanica, Stellaria media, Nassella trichotoma, Stipa neesiana, Agrostis stolonifera, Polygonum aviculare, Alopecurus japonicus, Beckmannia syzigachne, Bromus tectorum, Chloris inflate, Echinochloa erecta, Portulaca oleracea, and Senecio vulgaris. It is believed that all plants contain a phytoene desaturase gene in their genome, the sequence of which can be isolated and polynucleotides made according to the methods of the present invention that are useful for regulation, suppressing or delaying the expression of the target EPSPS gene in the plants and the growth or development of the treated plants.

[0019] A cultivated plant may also be considered a weedy plant when it occurs in unwanted environments. For example, corn plants growing in a soybean field. Transgenic crops with one or more herbicide tolerances may need specialized methods of management to control weeds and volunteer crop plants. The method enables the targeting of a transgene for herbicide tolerance to permit the treated plants to become sensitive to the herbicide. For example, an EPSPS DNA contained in a transgenic crop event can be a target for trigger molecules in order to render the transgenic crop sensitive to application of the corresponding glyphosate containing herbicide. Such transgenic events are known in the art and include but are not limited to DAS-44406-6, MON883302, MON87427, FG72, HCEM485, H7-1, ASR368, J101, J163, DP-098140, GHB614, 356043, MON89788, MON88913, RT200, NK603, GTSB77, GA21, MON1445, and 40-3-2 and US patent publications: 20110126310, 20090137395, herein incorporated in their entirety by reference hereto.

[0020] A “trigger” or “trigger polynucleotide” is a polynucleotide molecule that is homologous or complementary to a target gene polynucleotide. The trigger polynucleotide molecules modulate expression of the target gene when topically applied to a plant surface with a transfer agent, whereby a plant treated with said composition has its growth or development or reproductive ability regulated, suppressed or delayed or said plant is more sensitive to an EPSPS inhibitor herbicide as a result of said polynucleotide containing composition relative to a plant not treated with a composition containing the trigger molecule. Trigger polynucleotides disclosed herein are generally described in relation to the target gene sequence and maybe used in the sense (homologous) or antisense (complementary) orientation as single stranded molecules or comprise both strands as double stranded molecules or nucleotide variants and modified nucleotides thereof depending on the various regions of a gene being targeted.

[0021] It is contemplated that the composition may contain multiple polynucleotides and herbicides that include but are not limited to EPSPS gene trigger polynucleotides and an EPSPS inhibitor herbicide and one or more additional herbicide target gene trigger polynucleotides and the related herbicides and one or more additional essential gene trigger polynucleotides. Essential genes are genes in a plant that provide key enzymes or other proteins, for example, a biosynthetic enzyme, metabolizing enzyme, receptor, signal transduction protein, structural gene product, transcription factor, or transport protein; or regulating RNAs, such as, microRNAs, that are essential to the growth or survival of the organism or cell or involved in the normal growth and development of the plant (Meinke, et al., Trends Plant Sci. 2008:13(9):483-91). The suppression of an essential gene enhances the effect of a herbicide that affects the function of a gene product different than the suppressed essential gene. The compositions can include various trigger polynucleotides that modulate the expression of an essential gene other than an EPSPS gene.

[0022] Herbicides for which transgenes for plant tolerance have been demonstrated and the method can be applied, include but are not limited to: auxin-like herbicides, glyphosate, glufosinate, sulfonylureas, imidazolinones, bromoxynil, delapon, dicamba, cyclohezanedione, protoporphyrionogen oxidase inhibitors, 4-hydroxyphenyl-pyruvate-dioxygenase inhibitors herbicides. For example, transgenes and their polynucleotide molecules that encode proteins involved in herbicide tolerance are known in the art, and include, but are not limited to an 5-enolpyruvylshikimate-3-phosphate synthase (EPSPS), for example, as more fully described in U.S. Pat. Nos. 7,807,791 (SEQ ID NO:5); 6,248,876 B1; 5,627,061; 5,804,425; 5,633,435; 5,145,783; 4,971,908; 5,312,910; 5,188,642; 4,940,835; 5,866,775; 6,225,114 B1; 6,130,366; 5,310,667; 4,535,060; 4,769,061; 5,633,448; 5,510,471; U.S. Pat. No. Re. 36,449; U.S. Pat. Nos. RE 37,287 E; and 5,491,288; tolerance to sulfonylurea and/or imidazolinone, for example, as described more fully in U.S. Pat. Nos. 5,605,011; 5,013,659; 5,141,870; 5,767,361; 5,731,180; 5,304,732; 4,761,373; 5,331,107; 5,928,937; and 5,378,824; and international publication WO 96/33270; tolerance to hydroxyphenylpyruvatedioxygenases inhibiting herbicides in plants are described in U.S. Pat. Nos. 6,245,968 B1; 6,268,549; and 6,069,115; and U.S. Pat. No. 7,312,379 SEQ ID NO:3; U.S. Pat. No. 7,935,869; U.S. Pat. No. 7,304,209, SEQ ID NO:1, 3,5 and 15; aryloxyalkanoate dioxygenase polynucleotides, which confer tolerance to 2,4-D and other phenoxy auxin herbicides as well as to aryloxyphenoxypropionate herbicides as described, for example, in WO2005/107437; U.S. Pat. No. 7,838,733 SEQ ID NO:5;) and dicamba-tolerance polynucleotides as described, for example, in Herman et al. (2005) J. Biol. Chem. 280: 24759-24767. Other examples of herbicide-tolerance traits include those conferred by polynucleotides encoding an exogenous phosphinothricin acetyltransferase, as described in U.S. Pat. Nos. 5,969,213; 5,489,520; 5,550,318; 5,874,265; 5,919,675; 5,561,236; 5,648,477; 5,646,024; 6,177,616; and 5,879,903. Plants containing an exogenous phosphinothricin acetyltransferase can exhibit improved tolerance to glufosinate herbicides, which inhibit the enzyme glutamine synthase. Additionally, herbicide-tolerance polynucleotides include those conferred by polynucleotides conferring altered protoporphyrinogen oxidase (protox) activity, as described in U.S. Pat. Nos. 6,288,306 B1; 6,282,837 B1; and 5,767,373; and WO 01/12825. Plants containing such polynucleotides can exhibit improved tolerance to any of a variety of herbicides which target the protox enzyme (also referred to as protox inhibitors). Polynucleotides encoding a glyphosate oxidoreductase and a glyphosate-N-acetyl transferase (GOX described in U.S. Pat. No. 5,463,175 and GAT described in U.S. Patent publication 20030083480, dicamba monooxygenase U.S. Pat. Nos. 7,022,896 and 7,884,262, all of which are incorporated herein by reference); a polynucleotide molecule encoding bromoxynil nitrilase (Bxn described in U.S. Pat. No. 4,810,648 for Bromoxynil tolerance, which is incorporated herein by reference); a polynucleotide molecule encoding phytoene desaturase (crtl) described in Misawa et al, (1993) Plant J. 4:833-840 and Misawa et al, (1994) Plant J. 6:481-489 for norflurazon tolerance; a polynucleotide molecule encoding acetohydroxyacid synthase (AHAS, aka ALS) described in Sathasiivan et al. (1990) Nucl. Acids Res. 18:2188-2193 for tolerance to sulfonylurea herbicides; and the bar gene described in DeBlock, et al. (1987) EMBO J. 6:2513-2519 for glufosinate and bialaphos tolerance. The transgenic coding regions and regulatory elements of the herbicide tolerance genes are targets in which polynucleotide triggers and herbicides can be included in the composition and combinations thereof to provide for enhanced methods of weed control.

[0023] “Glyphosate” (N-phosphonomethylglycine) herbicide inhibits the shikimic acid pathway which leads to the biosynthesis of aromatic compounds including amino acids, plant hormones and vitamins. Specifically, glyphosate curbs the conversion of phosphoenolpyruvic acid (PEP) and 3-phosphoshikimic acid to 5-enolpyruvyl-3-phosphoshikimic acid by inhibiting the enzyme 5-enolpyruvylshikimate-3-phosphate synthase (hereinafter referred to as EPSP synthase or EPSPS). The term “glyphosate” should be considered to include any herbicidally effective form of N-phosphonomethylglycine (including any salt thereof) and other forms which result in the production of the glyphosate anion in planta. Glyphosate is an example of an EPSPS inhibitor herbicide. Herbicides are molecules that affect plant growth or development or reproductive ability.

[0024] Glyphosate is commercially available in numerous formulations. Examples of these formulations of glyphosate include, without limitation, those sold by Monsanto Company (St Louis, Mo.) as ROUNDUP®, ROUNDUP® ULTRA, ROUNDUP® ULTRAMAX, ROUNDUP® CT, ROUNDUP® EXTRA, ROUNDUP® BIACTIVE, ROUNDUP® BIOFORCE, RODEO®, POLARIS®, SPARK® and ACCORD® herbicides, all of which contain glyphosate as its isopropylammonium salt, ROUNDUP® WEATHERMAX containing glyphosate as its potassium salt; ROUNDUP® DRY and RIVAL® herbicides, which contain glyphosate as its ammonium salt; ROUNDUP® GEOFORCE, which contains glyphosate as its sodium salt; and TOUCHDOWN® herbicide (Syngenta, Greensboro, N.C.), which contains glyphosate as its trimethylsulfonium salt. Various other salts of glyphosate are available for example, dimethylamine salt, isopropylamine salt, trimesium salt, potassium salt, monoammonium salt, and diammonium salt. Commerical formulations and application rates thereof are often defined in terms of acid equivalent pounds pe acre (a.e. Lb/ac).

[0025] Numerous herbicides with similar or different modes of action (herein referred to as co-herbicides) are available that can be added to the composition that provide multi-species weed control or alternative modes of action for difficult to control weed species, for example, members of the herbicide families that include but are not limited to amide herbicides, aromatic acid herbicides, arsenical herbicides, benzothiazole herbicides, benzoylcyclohexanedione herbicides, benzofuranyl alkylsulfonate herbicides, carbamate herbicides, cyclohexene oxime herbicides, cyclopropylisoxazole herbicides, dicarboximide herbicides, dinitroaniline herbicides, dinitrophenol herbicides, diphenyl ether herbicides, dithiocarbamate herbicides, halogenated aliphatic herbicides, imidazolinone herbicides, inorganic herbicides, nitrile herbicides, organophosphorus herbicides, oxadiazolone herbicides, oxazole herbicides, phenoxy herbicides, phenylenediamine herbicides, pyrazole herbicides, pyridazine herbicides, pyridazinone herbicides, pyridine herbicides, pyrimidinediamine herbicides, pyrimidinyloxybenzylamine herbicides, quaternary ammonium herbicides, thiocarbamate herbicides, thiocarbonate herbicides, thiourea herbicides, triazine herbicides, triazinone herbicides, triazole herbicides, triazolone herbicides, triazolopyrimidine herbicides, uracil herbicides, and urea herbicides. In particular, the rates of use of the added herbicides can be reduced in compositions comprising the polynucleotides. Use rate reductions of the additional added herbicides can be 10-25 percent, 26-50 percent, 51-75 percent or more can be achieved that enhance the activity of the polynucleotides and herbicide composition and is contemplated. Representative herbicides of the families include but are not limited to acetochlor, acifluorfen, acifluorfen-sodium, aclonifen, acrolein, alachlor, alloxydim, allyl alcohol, ametryn, amicarbazone, amidosulfuron, aminopyralid, amitrole, ammonium sulfamate, anilofos, asulam, atraton, atrazine, azimsulfuron, BCPC, beflubutamid, benazolin, benfluralin, benfuresate, bensulfuron, bensulfuron-methyl, bensulide, bentazone, benzfendizone, benzobicyclon, benzofenap, bifenox, bilanafos, bispyribac, bispyribac-sodium, borax, bromacil, bromobutide, bromoxynil, butachlor, butafenacil, butamifos, butralin, butroxydim, butylate, cacodylic acid, calcium chlorate, cafenstrole, carbetamide, carfentrazone, carfentrazone-ethyl, CDEA, CEPC, chlorflurenol, chlorflurenol-methyl, chloridazon, chlorimuron, chlorimuron-ethyl, chloroacetic acid, chlorotoluron, chlorpropham, chlorsulfuron, chlorthal, chlorthal-dimethyl, cinidon-ethyl, cinmethylin, cinosulfuron, cisanilide, clethodim, clodinafop, clodinafop-propargyl, clomazone, clomeprop, clopyralid, cloransulam, cloransulam-methyl, CMA, 4-CPB, CPMF, 4-CPP, CPPC, cresol, cumyluron, cyanamide, cyanazine, cycloate, cyclosulfamuron, cycloxydim, cyhalofop, cyhalofop-butyl, 2,4-D, 3,4-DA, daimuron, dalapon, dazomet, 2,4-DB, 3,4-DB, 2,4-DEB, desmedipham, dicamba, dichlobenil, ortho-dichlorobenzene, para-dichlorobenzene, dichlorprop, dichlorprop-P, diclofop, diclofop-methyl, diclosulam, difenzoquat, difenzoquat metilsulfate, diflufenican, diflufenzopyr, dimefuron, dimepiperate, dimethachlor, dimethametryn, dimethenamid, dimethenamid-P, dimethipin, dimethylarsinic acid, dinitramine, dinoterb, diphenamid, diquat, diquat dibromide, dithiopyr, diuron, DNOC, 3,4-DP, DSMA, EBEP, endothal, EPTC, esprocarb, ethalfluralin, ethametsulfuron, ethametsulfuron-methyl, ethofumesate, ethoxyfen, ethoxysulfuron, etobenzanid, fenoxaprop-P, fenoxaprop-P-ethyl, fentrazamide, ferrous sulfate, flamprop-M, flazasulfuron, florasulam, fluazifop, fluazifop-butyl, fluazifop-P, fluazifop-P-butyl, flucarbazone, flucarbazone-sodium, flucetosulfuron, fluchloralin, flufenacet, flufenpyr, flufenpyr-ethyl, flumetsulam, flumiclorac, flumiclorac-pentyl, flumioxazin, fluometuron, fluoroglycofen, fluoroglycofen-ethyl, flupropanate, flupyrsulfuron, flupyrsulfuron-methyl-sodium, flurenol, fluridone, fluorochloridone, fluoroxypyr, flurtamone, fluthiacet, fluthiacet-methyl, fomesafen, foramsulfuron, fosamine, glufosinate, glufosinate-ammonium, glyphosate, halosulfuron, halosulfuron-methyl, haloxyfop, haloxyfop-P, HC-252, hexazinone, imazamethabenz, imazamethabenz-methyl, imazamox, imazapic, imazapyr, imazaquin, imazethapyr, imazosulfuron, indanofan, iodomethane, iodosulfuron, iodosulfuron-methyl-sodium, ioxynil, isoproturon, isouron, isoxaben, isoxachlortole, isoxaflutole, karbutilate, lactofen, lenacil, linuron, MAA, MAMA, MCPA, MCPA-thioethyl, MCPB, mecoprop, mecoprop-P, mefenacet, mefluidide, mesosulfuron, mesosulfuron-methyl, mesotrione, metam, metamifop, metamitron, metazachlor, methabenzthiazuron, methylarsonic acid, methyldymron, methyl isothiocyanate, metobenzuron, metolachlor, S-metolachlor, metosulam, metoxuron, metribuzin, metsulfuron, metsulfuron-methyl, MK-66, molinate, monolinuron, MSMA, naproanilide, napropamide, naptalam, neburon, nicosulfuron, nonanoic acid, norflurazon, oleic acid (fatty acids), orbencarb, orthosulfamuron, oryzalin, oxadiargyl, oxadiazon, oxasulfuron, oxaziclomefone, oxyfluorfen, paraquat, paraquat dichloride, pebulate, pendimethalin, penoxsulam, pentachlorophenol, pentanochlor, pentoxazone, pethoxamid, petrolium oils, phenmedipham, phenmedipham-ethyl, picloram, picolinafen, pinoxaden, piperophos, potassium arsenite, potassium azide, pretilachlor, primisulfuron, primisulfuron-methyl, prodiamine, profluazol, profoxydim, prometon, prometryn, propachlor, propanil, propaquizafop, propazine, propham, propisochlor, propoxycarbazone, propoxycarbazone-sodium, propyzamide, prosulfocarb, prosulfuron, pyraclonil, pyraflufen, pyraflufen-ethyl, pyrazolynate, pyrazosulfuron, pyrazosulfuron-ethyl, pyrazoxyfen, pyribenzoxim, pyributicarb, pyridafol, pyridate, pyriftalid, pyriminobac, pyriminobac-methyl, pyrimisulfan, pyrithiobac, pyrithiobac-sodium, quinclorac, quinmerac, quinoclamine, quizalofop, quizalofop-P, rimsulfuron, sethoxydim, siduron, simazine, simetryn, SMA, sodium arsenite, sodium azide, sodium chlorate, sulcotrione, sulfentrazone, sulfometuron, sulfometuron-methyl, sulfosate, sulfosulfuron, sulfuric acid, tar oils, 2,3,6-TBA, TCA, TCA-sodium, tebuthiuron, tepraloxydim, terbacil, terbumeton, terbuthylazine, terbutryn, thenylchlor, thiazopyr, thifensulfuron, thifensulfuron-methyl, thiobencarb, tiocarbazil, topramezone, tralkoxydim, tri-allate, triasulfuron, triaziflam, tribenuron, tribenuron-methyl, tricamba, triclopyr, trietazine, trifloxysulfuron, trifloxysulfuron-sodium, trifluralin, triflusulfuron, triflusulfuron-methyl, trihydroxytriazine, tritosulfuron, [3-[2-chloro-4-fluoro-5-(-methyl-6-trifluoromethyl-2,4-dioxo-,2,3,44-etrahydropyrimidin-3-yl)phenoxy]-2-pyridyloxy]acetic acid ethyl ester (CAS RN 353292-3-6), 4-[(4,5-dihydro-3-methoxy-4-methyl-5-oxo)-H-,2,4-triazol-1-ylcarbonyl-sulfamoyl]-5-methylthiophene-3-carboxylic acid (BAY636), BAY747 (CAS RN 33504-84-2), topramezone (CAS RN 2063-68-8), 4-hydroxy-3-[[2-[(2-methoxyethoxy)methyl]-6-(trifluoro-methyl)-3-pyridi-nyl]carbonyl]-bicyclo[3.2.]oct-3-en-2-one (CAS RN 35200-68-5), and 4-hydroxy-3-[[2-(3-methoxypropyl)-6-(difluoromethyl)-3-pyridinyl]carbon-yl]-bicyclo[3,2]oct-3-en-2-one. Additionally, including herbicidal compounds of unspecified modes of action as described in CN101279950A, CN101279951A, DE10000600A1, DE10116399A1, DE102004054666A1, DE102005014638A1, DE102005014906A1, DE102007012168A1, DE102010042866A1, DE10204951A1, DE10234875A1, DE10234876A1, DE10256353A1, DE10256354A1, DE10256367A1, EP1157991A2, EP1238586A1, EP2147919A1, EP2160098A2, JP03968012B2, JP2001253874A, JP2002080454A, JP2002138075A, JP2002145707A, JP2002220389A, JP2003064059A, JP2003096059A, JP2004051628A, JP2004107228A, JP2005008583A, JP2005239675A, JP2005314407A, JP2006232824A, JP2006282552A, JP2007153847A, JP2007161701A, JP2007182404A, JP2008074840A, JP2008074841A, JP2008133207A, JP2008133218A, JP2008169121A, JP2009067739A, JP2009114128A, JP2009126792A, JP2009137851A, US20060111241A1, US20090036311A1, US20090054240A1, US20090215628A1, US20100099561A1, US20100152443A1, US20110105329A1, US20110201501A1, WO2001055066A2, WO2001056975A1, WO2001056979A1, WO2001090071A2, WO2001090080A1, WO2002002540A1, WO2002028182A1, WO2002040473A1, WO2002044173A2, WO2003000679A2, WO2003006422A1, WO2003013247A1, WO2003016308A1, WO2003020704A1, WO2003022051A1, WO2003022831A1, WO2003022843A1, WO2003029243A2, WO2003037085A1, WO2003037878A1, WO2003045878A2, WO2003050087A2, WO2003051823A1, WO2003051824A1, WO2003051846A2, WO2003076409A1, WO2003087067A1, WO2003090539A1, WO2003091217A1, WO2003093269A2, WO2003104206A2, WO2004002947A1, WO2004002981A2, WO2004011429A1, WO2004029060A1, WO2004035545A2, WO2004035563A1, WO2004035564A1, WO2004037787A1, WO2004067518A1, WO2004067527A1, WO2004077950A1, WO2005000824A1, WO2005007627A1, WO2005040152A1, WO2005047233A1, WO2005047281A1, WO2005061443A2, WO2005061464A1, WO2005068434A1, WO2005070889A1, WO2005089551A1, WO2005095335A1, WO2006006569A1, WO2006024820A1, WO2006029828A1, WO2006029829A1, WO2006037945A1, WO2006050803A1, WO2006090792A1, WO2006123088A2, WO2006125687A1, WO2006125688A1, WO2007003294A1, WO2007026834A1, WO2007071900A1, WO2007077201A1, WO2007077247A1, WO2007096576A1, WO2007119434A1, WO2007134984A1, WO2008009908A1, WO2008029084A1, WO2008059948A1, WO2008071918A1, WO2008074991A1, WO2008084073A1, WO2008100426A2, WO2008102908A1, WO2008152072A2, WO2008152073A2, WO2009000757A1, WO2009005297A2, WO2009035150A2, WO2009063180A1, WO2009068170A2, WO2009068171A2, WO2009086041A1, WO2009090401A2, WO2009090402A2, WO2009115788A1, WO2009116558A1, WO2009152995A1, WO2009158258A1, WO2010012649A1, WO2010012649A1, WO2010026989A1, WO2010034153A1, WO2010049270A1, WO2010049369A1, WO2010049405A1, WO2010049414A1, WO2010063422A1, WO2010069802A1, WO2010078906A2, WO2010078912A1, WO2010104217A1, WO2010108611A1, WO2010112826A3, WO2010116122A3, WO2010119906A1, WO2010130970A1, WO2011003776A2, WO2011035874A1, WO2011065451A1, all of which are incorporated herein by reference.

[0026] Auxin-like herbicides include benzoic acid herbicide, phenoxy carboxylic acid herbicide, pyridine carboxylic acid herbicide, quinoline carboxylic acid herbicide, pyrimidine carboxylic acid herbicide, and benazolin-ethyl herbicide.

[0027] The benzoic acid herbicide group (dicamba (3,6-dichloro-o-anisic acid), chloramben (3-amino-2,5-dichlorobenzoic acid), and TBA (2,3,6-trichlorobenzoic acid)) are effective herbicides for both pre-emergence and post-emergence weed management. Dicamba is one of the many auxin-like herbicides that is a low-cost, environmentally friendly herbicide that has been used as a pre-emergence and post-emergence herbicide to effectively control annual and perennial broadleaf weeds and several grassy weeds in corn, sorghum, small grains, pasture, hay, rangeland, sugarcane, asparagus, turf, and grass seed crops (Crop Protection Chemicals Reference, pp. 1803-1821, Chemical & Pharmaceutical Press, Inc., New York, N.Y., 11th ed., 1995). Dicamba refers to 3,6-dichloro-o-anisic acid or 3,6-dichloro-2-methoxy benzoic acid and its acids and salts. Its salts include isopropylamine, diglycoamine, dimethylamine, potassium and sodium. Dicamba includes for example, commercial formulations without limitation, Banvel™ (as DMA salt, BASF, Research Triangle Park, N.C.), Clarity® (DGA salt, BASF), VEL-58-CS-11™ (BASF) and Vanquish™ (DGA salt, BASF). Dicamba is a useful herbicide as a tank mix, concomitantly, or pre or post treatment with the compositions.

[0028] An auxin-like herbicide also includes a phenoxy carboxylic acid compound, a pyridine carboxylic acid compound, a quinoline carboxylic acid compound, and a benazolin-ethyl compound. Examples of a phenoxy carboxylic acid compound include, but are not limited to 2,4-dichlorophenoxyacetic acid, (4-chloro-2-methylphenoxy) acetic acid, diclorprop (2,4-DP), mecoprop (MCPP), and clomeprop. Examples of pyridine herbicides include, but are not limited to clopryalid, picloram, fluoroxypyr, aminocyclopyrachlor and triclopyr. These auxin-like herbicides are useful in a tank mix, concomitantly, or pre or post treatment with the compositions. Auxin-like herbicides include commercially available formulations, for example, including but not limited to 2,4-D, 2,4-DB (Butyrac® 200, Bakker), MCPA (Rhonox®, Rhomene), mecoprop, dichlorprop, 2,4,5-T, triclopyr (Garlon®, Dow AgroSciences, Indianapolis, Ind.), chloramben, dicamba (Banvel®, Clarity®, Oracle®, Sterling®), 2,3,6-TBA, tricamba, clopyralid (Stinger®, Dow AgroSciences), picloram (Tordon®, Dow AgroSciences), quinmerac, quinclorac, benazolin, fenac, IAA, NAA, orthonil and fluoroxypyr (Vista®, Starane®, Dow AgroSciences), aminopyralid (Milestone®, Dow AgroSciences) and aminocyclopyrachlor (Dupont, Wilmington, Del.).

[0029] The trigger polynucleotide and oligonucleotide molecule compositions are useful in compositions, such as liquids that comprise the polynucleotide molecules at low concentrations, alone or in combination with other components, for example one or more herbicide molecules, either in the same solution or in separately applied liquids that also provide a transfer agent. While there is no upper limit on the concentrations and dosages of polynucleotide molecules that can useful in the methods, lower effective concentrations and dosages will generally be sought for efficiency. The concentrations can be adjusted in consideration of the volume of spray or treatment applied to plant leaves or other plant part surfaces, such as flower petals, stems, tubers, fruit, anthers, pollen, or seed. In one embodiment, a useful treatment for herbaceous plants using 25-mer oligonucleotide molecules is about 1 nanomole (nmol) of oligonucleotide molecules per plant, for example, from about 0.05 to 1 nmol per plant. Other embodiments for herbaceous plants include useful ranges of about 0.05 to about 100 nmol, or about 0.1 to about 20 nmol, or about 1 nmol to about 10 nmol of polynucleotides per plant. Very large plants, trees, or vines may require correspondingly larger amounts of polynucleotides. When using long dsRNA molecules that can be processed into multiple oligonucleotides, lower concentrations can be used. To illustrate embodiments, the factor 1×, when applied to oligonucleotide molecules is arbitrarily used to denote a treatment of 0.8 nmol of polynucleotide molecule per plant; 10×, 8 nmol of polynucleotide molecule per plant; and 100×, 80 nmol of polynucleotide molecule per plant.

[0030] The polynucleotide compositions are useful in compositions, such as liquids that comprise polynucleotide molecules, alone or in combination with other components either in the same liquid or in separately applied liquids that provide a transfer agent. As used herein, a transfer agent is an agent that, when combined with a polynucleotide in a composition that is topically applied to a target plant surface, enables the polynucleotide to enter a plant cell. In certain embodiments, a transfer agent is an agent that conditions the surface of plant tissue, e.g., leaves, stems, roots, flowers, or fruits, to permeation by the polynucleotide molecules into plant cells. The transfer of polynucleotides into plant cells can be facilitated by the prior or contemporaneous application of a polynucleotide-transferring agent to the plant tissue. In some embodiments the transferring agent is applied subsequent to the application of the polynucleotide composition. The polynucleotide transfer agent enables a pathway for polynucleotides through cuticle wax barriers, stomata and/or cell wall or membrane barriers into plant cells. Suitable transfer agents to facilitate transfer of the polynucleotide into a plant cell include agents that increase permeability of the exterior of the plant or that increase permeability of plant cells to oligonucleotides or polynucleotides. Such agents to facilitate transfer of the composition into a plant cell include a chemical agent, or a physical agent, or combinations thereof. Chemical agents for conditioning or transfer include (a) surfactants, (b) an organic solvent or an aqueous solution or aqueous mixtures of organic solvents, (c) oxidizing agents, (d) acids, (e) bases, (f) oils, (g) enzymes, or combinations thereof. Embodiments of the method can optionally include an incubation step, a neutralization step (e.g., to neutralize an acid, base, or oxidizing agent, or to inactivate an enzyme), a rinsing step, or combinations thereof. Embodiments of agents or treatments for conditioning of a plant to permeation by polynucleotides include emulsions, reverse emulsions, liposomes, and other micellar-like compositions. Embodiments of agents or treatments for conditioning of a plant to permeation by polynucleotides include counter-ions or other molecules that are known to associate with nucleic acid molecules, e.g., inorganic ammonium ions, alkyl ammonium ions, lithium ions, polyamines such as spermine, spermidine, or putrescine, and other cations. Organic solvents useful in conditioning a plant to permeation by polynucleotides include DMSO, DMF, pyridine, N-pyrrolidine, hexamethylphosphoramide, acetonitrile, dioxane, polypropylene glycol, other solvents miscible with water or that will dissolve phosphonucleotides in non-aqueous systems (such as is used in synthetic reactions). Naturally derived or synthetic oils with or without surfactants or emulsifiers can be used, e.g., plant-sourced oils, crop oils (such as those listed in the 9^{th} Compendium of Herbicide Adjuvants, publicly available on the worldwide web (internet) at herbicide.adjuvants.com can be used, e.g., paraffinic oils, polyol fatty acid esters, or oils with short-chain molecules modified with amides or polyamines such as polyethyleneimine or N-pyrrolidine. Transfer agents include, but are not limited to, organosilicone preparations.

[0031] An agronomic field in need of plant control is treated by application of an agricultural chemical composition directly to the surface of the growing plants, such as by a spray. For example, the method is applied to control weeds in a field of crop plants by spraying the field with the composition. The composition can be provided as a tank mix with one or more herbicidal chemical and additional pesticidal chemicals to control pests and diseases of the crop plants in need of pest and disease control, a sequential treatment of components (generally the polynucleotide containing composition followed by the herbicide), or a simultaneous treatment or mixing of one or more of the components of the composition from separate containers. Treatment of the field can occur as often as needed to provide weed control and the components of the composition can be adjusted to target specific weed species or weed families through utilization of specific polynucleotides or polynucleotide compositions capable of selectively targeting the specific species or plant family to be controlled. The composition can be applied at effective use rates according to the time of application to the field, for example, preplant, at planting, post planting, post harvest. Glyphosate can be applied to a field at rates of 11-44 ounces/acre up to 7.2875 pounds/acre. The polynucleotides of the composition can be applied at rates of 1 to 30 grams per acre depending on the number of trigger molecules needed for the scope of weeds in the field.

[0032] Crop plants in which weed control may be needed include but are not limited to corn, soybean, cotton, canola, sugar beet, alfalfa, sugarcane, rice, and wheat; vegetable plants including, but not limited to, tomato, sweet pepper, hot pepper, melon, watermelon, cucumber, eggplant, cauliflower, broccoli, lettuce, spinach, onion, peas, carrots, sweet corn, Chinese cabbage, leek, fennel, pumpkin, squash or gourd, radish, Brussels sprouts, tomatillo, garden beans, dry beans, or okra; culinary plants including, but not limited to, basil, parsley, coffee, or tea; or fruit plants including but not limited to apple, pear, cherry, peach, plum, apricot, banana, plantain, table grape, wine grape, citrus, avocado, mango, or berry; a tree grown for ornamental or commercial use, including, but not limited to, a fruit or nut tree; ornamental plant (e.g., an ornamental flowering plant or shrub or turf grass). The methods and compositions provided herein can also be applied to plants produced by a cutting, cloning, or grafting process (i.e., a plant not grown from a seed) including fruit trees and plants that include, but are not limited to, avocados, tomatoes, eggplant, cucumber, melons, watermelons, and grapes as well as various ornamental plants.

### Pesticidal Mixtures

[0033] The polynucleotide compositions may also be used as mixtures with various agricultural chemicals and/or insecticides, miticides and fungicides, pesticidal and biopesticidal agents. Examples include but are not limited to azinphos-methyl, acephate, isoxathion, isofenphos, ethion, etrimfos, oxydemeton-methyl, oxydeprofos, quinalphos, chlorpyrifos, chlorpyrifos-methyl, chlorfenvinphos, cyanophos, dioxabenzofos, dichlorvos, disulfoton, dimethylvinphos, dimethoate, sulprofos, diazinon, thiometon, tetrachlorvinphos, temephos, tebupirimfos, terbufos, naled, vamidothion, pyraclofos, pyridafenthion, pirimiphos-methyl, fenitrothion, fenthion, phenthoate, flupyrazophos, prothiofos, propaphos, profenofos, phoxime, phosalone, phosmet, formothion, phorate, malathion, mecarbam, mesulfenfos, methamidophos, methidathion, parathion, methyl parathion, monocrotophos, trichlorphon, EPN, isazophos, isamidofos, cadusafos, diamidaphos, dichlofenthion, thionazin, fenamiphos, fosthiazate, fosthietan, phosphocarb, DSP, ethoprophos, alanycarb, aldicarb, isoprocarb, ethiofencarb, carbaryl, carbosulfan, xylylcarb, thiodicarb, pirimicarb, fenobucarb, furathiocarb, propoxur, bendiocarb, benfuracarb, methomyl, metolcarb, XMC, carbofuran, aldoxycarb, oxamyl, acrinathrin, allethrin, esfenvalerate, empenthrin, cycloprothrin, cyhalothrin, gamma-cyhalothrin, lambda-cyhalothrin, cyfluthrin, beta-cyfluthrin, cypermethrin, alpha-cypermethrin, zeta-cypermethrin, silafluofen, tetramethrin, tefluthrin, deltamethrin, tralomethrin, bifenthrin, phenothrin, fenvalerate, fenpropathrin, furamethrin, prallethrin, flucythrinate, fluvalinate, flubrocythrinate, permethrin, resmethrin, ethofenprox, cartap, thiocyclam, bensultap, acetamiprid, imidacloprid, clothianidin, dinotefuran, thiacloprid, thiamethoxam, nitenpyram, chlorfluazuron, diflubenzuron, teflubenzuron, triflumuron, novaluron, noviflumuron, bistrifluoron, fluazuron, flucycloxuron, flufenoxuron, hexaflumuron, lufenuron, chromafenozide, tebufenozide, halofenozide, methoxyfenozide, diofenolan, cyromazine, pyriproxyfen, buprofezin, methoprene, hydroprene, kinoprene, triazamate, endosulfan, chlorfenson, chlorobenzilate, dicofol, bromopropylate, acetoprole, fipronil, ethiprole, pyrethrin, rotenone, nicotine sulphate, BT (Bacillus Thuringiensis) agent, spinosad, abamectin, acequinocyl, amidoflumet, amitraz, etoxazole, chinomethionat, clofentezine, fenbutatin oxide, dienochlor, cyhexatin, spirodiclofen, spiromesifen, tetradifon, tebufenpyrad, binapacryl, bifenazate, pyridaben, pyrimidifen, fenazaquin, fenothiocarb, fenpyroximate, fluacrypyrim, fluazinam, flufenzin, hexythiazox, propargite, benzomate, polynactin complex, milbemectin, lufenuron, mecarbam, methiocarb, mevinphos, halfenprox, azadirachtin, diafenthiuron, indoxacarb, emamectin benzoate, potassium oleate, sodium oleate, chlorfenapyr, tolfenpyrad, pymetrozine, fenoxycarb, hydramethylnon, hydroxy propyl starch, pyridalyl, flufenerim, flubendiamide, flonicamid, metaflumizole, lepimectin, TPIC, albendazole, oxibendazole, oxfendazole, trichlamide, fensulfothion, fenbendazole, levamisole hydrochloride, morantel tartrate, dazomet, metam-sodium, triadimefon, hexaconazole, propiconazole, ipconazole, prochloraz, triflumizole, tebuconazole, epoxiconazole, difenoconazole, flusilazole, triadimenol, cyproconazole, metconazole, fluquinconazole, bitertanol, tetraconazole, triticonazole, flutriafol, penconazole, diniconazole, fenbuconazole, bromuconazole, imibenconazole, simeconazole, myclobutanil, hymexazole, imazalil, furametpyr, thifluzamide, etridiazole, oxpoconazole, oxpoconazole fumarate, pefurazoate, prothioconazole, pyrifenox, fenarimol, nuarimol, bupirimate, mepanipyrim, cyprodinil, pyrimethanil, metalaxyl, mefenoxam, oxadixyl, benalaxyl, thiophanate, thiophanate-methyl, benomyl, carbendazim, fuberidazole, thiabendazole, manzeb, propineb, zineb, metiram, maneb, ziram, thiuram, chlorothalonil, ethaboxam, oxycarboxin, carboxin, flutolanil, silthiofam, mepronil, dimethomorph, fenpropidin, fenpropimorph, spiroxamine, tridemorph, dodemorph, flumorph, azoxystrobin, kresoxim-methyl, metominostrobin, orysastrobin, fluoxastrobin, trifloxystrobin, dimoxystrobin, pyraclostrobin, picoxystrobin, iprodione, procymidone, vinclozolin, chlozolinate, flusulfamide, dazomet, methyl isothiocyanate, chloropicrin, methasulfocarb, hydroxyisoxazole, potassium hydroxyisoxazole, echlomezol, D-D, carbam, basic copper chloride, basic copper sulfate, copper nonylphenolsulfonate, oxine copper, DBEDC, anhydrous copper sulfate, copper sulfate pentahydrate, cupric hydroxide, inorganic sulfur, wettable sulfur, lime sulfur, zinc sulfate, fentin, sodium hydrogen carbonate, potassium hydrogen carbonate, sodium hypochlorite, silver, edifenphos, tolclofos-methyl, fosetyl, iprobenfos, dinocap, pyrazophos, carpropamid, fthalide, tricyclazole, pyroquilon, diclocymet, fenoxanil, kasugamycin, validamycin, polyoxins, blasticiden S, oxytetracycline, mildiomycin, streptomycin, rape seed oil, machine oil, benthiavalicarbisopropyl, iprovalicarb, propamocarb, diethofencarb, fluoroimide, fludioxanil, fenpiclonil, quinoxyfen, oxolinic acid, chlorothalonil, captan, folpet, probenazole, acibenzolar-S-methyl, tiadinil, cyflufenamid, fenhexamid, diflumetorim, metrafenone, picobenzamide, proquinazid, famoxadone, cyazofamid, fenamidone, zoxamide, boscalid, cymoxanil, dithianon, fluazinam, dichlofluanide, triforine, isoprothiolane, ferimzone, diclomezine, tecloftalam, pencycuron, chinomethionat, iminoctadine acetate, iminoctadine albesilate, ambam, polycarbamate, thiadiazine, chloroneb, nickel dimethyldithiocarbamate, guazatine, dodecylguanidine-acetate, quintozene, tolylfluanid, anilazine, nitrothalisopropyl, fenitropan, dimethirimol, benthiazole, harpin protein, flumetover, mandipropamide and penthiopyrad.

### Polynucleotides

[0034] As used herein, the term “DNA”, “DNA molecule”, “DNA polynucleotide molecule” refers to a single-stranded DNA (ssDNA) or double-stranded DNA (dsDNA) molecule of genomic or synthetic origin, such as, a polymer of deoxyribonucleotide bases or a DNA polynucleotide molecule. As used herein, the term “DNA sequence”, “DNA nucleotide sequence” or “DNA polynucleotide sequence” refers to the nucleotide sequence of a DNA molecule. As used herein, the term “RNA”, “RNA molecule”, “RNA polynucleotide molecule” refers to a single-stranded RNA (ssRNA) or double-stranded RNA (dsRNA) molecule of genomic or synthetic origin, such as, a polymer of ribonucleotide bases that comprise single or double stranded regions. Unless otherwise stated, nucleotide sequences in the text of this specification are given, when read from left to right, in the 5′ to 3′ direction. The nomenclature used herein is that required by Title 37 of the United States Code of Federal Regulations §1.822 and set forth in the tables in WIPO Standard ST.25 (1998), Appendix 2, Tables 1 and 3.

[0035] As used herein, “polynucleotide” refers to a DNA or RNA molecule containing multiple nucleotides and generally refers both to “oligonucleotides” (a polynucleotide molecule of typically 50 or fewer nucleotides in length) and polynucleotides of 51 or more nucleotides. Embodiments include compositions including oligonucleotides having a length of 18-25 nucleotides (18-mers, 19-mers, 20-mers, 21-mers, 22-mers, 23-mers, 24-mers, or 25-mers), for example, oligonucleotides SEQ ID NO:3223-3542 or fragments thereof or medium-length polynucleotides having a length of 26 or more nucleotides (polynucleotides of 26, 27, 28, 29, 30, 31, 32, 33, 34, 35, 36, 37, 38, 39, 40, 41, 42, 43, 44, 45, 46, 47, 48, 49, 50, 51, 52, 53, 54, 55, 56, 57, 58, 59, 60, about 65, about 70, about 75, about 80, about 85, about 90, about 95, about 100, about 110, about 120, about 130, about 140, about 150, about 160, about 170, about 180, about 190, about 200, about 210, about 220, about 230, about 240, about 250, about 260, about 270, about 280, about 290, or about 300 nucleotides), for example, oligonucleotides SEQ ID NO:121-3222 or fragments thereof or long polynucleotides having a length greater than about 300 nucleotides (for example, polynucleotides of between about 300 to about 400 nucleotides, between about 400 to about 500 nucleotides, between about 500 to about 600 nucleotides, between about 600 to about 700 nucleotides, between about 700 to about 800 nucleotides, between about 800 to about 900 nucleotides, between about 900 to about 1000 nucleotides, between about 300 to about 500 nucleotides, between about 300 to about 600 nucleotides, between about 300 to about 700 nucleotides, between about 300 to about 800 nucleotides, between about 300 to about 900 nucleotides, or about 1000 nucleotides in length, or even greater than about 1000 nucleotides in length, for example up to the entire length of a target gene including coding or non-coding or both coding and non-coding portions of the target gene), for example, polynucleotides of Table 1 (SEQ ID NO:1-120), wherein the selected polynucleotides or fragments thereof are homologous or complementary to SEQ ID NO:1-120 and suppresses, represses or otherwise delay the expression of the target EPSPS gene. Where a polynucleotide is double-stranded, its length can be similarly described in terms of base pairs. A target gene comprises any polynucleotide molecule in a plant cell or fragment thereof for which the modulation of the expression of the target gene is provided by the methods and compositions. A gene has noncoding genetic elements (components) that provide for the function of the gene, these elements are polynucleotides that provide gene expression regulation, such as, a promoter, an enhancer, a 5′ untranslated region, intron regions, and a 3′ untranslated region. Oligonucleotides and polynucleotides can be made to any of the genetic elements of a gene and to polynucleotides spanning the junction region of a genetic element, such as, an intron and exon, the junction region of a promoter and a transcribed region, the junction region of a 5′ leader and a coding sequence, the junction of a 3′ untranslated region and a coding sequence.

[0036] Polynucleotide compositions used in the various embodiments include compositions including oligonucleotides or polynucleotides or a mixture of both, including RNA or DNA or RNA/DNA hybrids or chemically modified oligonucleotides or polynucleotides or a mixture thereof. In some embodiments, the polynucleotide may be a combination of ribonucleotides and deoxyribonucleotides, for example, synthetic polynucleotides consisting mainly of ribonucleotides but with one or more terminal deoxyribonucleotides or synthetic polynucleotides consisting mainly of deoxyribonucleotides but with one or more terminal dideoxyribonucleotides. In some embodiments, the polynucleotide includes non-canonical nucleotides such as inosine, thiouridine, or pseudouridine. In some embodiments, the polynucleotide includes chemically modified nucleotides. Examples of chemically modified oligonucleotides or polynucleotides are well known in the art; see, for example, US Patent Publication 20110171287, US Patent Publication 20110171176, and US Patent Publication 20110152353, US Patent Publication, 20110152346, US Patent Publication 20110160082, herein incorporated in its entirety by reference hereto. For example, including but not limited to the naturally occurring phosphodiester backbone of an oligonucleotide or polynucleotide can be partially or completely modified with phosphorothioate, phosphorodithioate, or methylphosphonate internucleotide linkage modifications, modified nucleoside bases or modified sugars can be used in oligonucleotide or polynucleotide synthesis, and oligonucleotides or polynucleotides can be labeled with a fluorescent moiety (for example, fluorescein or rhodamine) or other label (for example, biotin).

[0037] The polynucleotides can be single- or double-stranded RNA or single- or double-stranded DNA or double-stranded DNA/RNA hybrids or modified analogues thereof, and can be of oligonucleotide lengths or longer. In more specific embodiments, the polynucleotides that provide single-stranded RNA in the plant cell are selected from the group consisting of (a) a single-stranded RNA molecule (ssRNA), (b) a single-stranded RNA molecule that self-hybridizes to form a double-stranded RNA molecule, (c) a double-stranded RNA molecule (dsRNA), (d) a single-stranded DNA molecule (ssDNA), (e) a single-stranded DNA molecule that self-hybridizes to form a double-stranded DNA molecule, and (f) a single-stranded DNA molecule including a modified Pol III gene that is transcribed to an RNA molecule, (g) a double-stranded DNA molecule (dsDNA), (h) a double-stranded DNA molecule including a modified Pol III gene that is transcribed to an RNA molecule, (i) a double-stranded, hybridized RNA/DNA molecule, or combinations thereof. In some embodiments these polynucleotides include chemically modified nucleotides or non-canonical nucleotides. In some embodiments, the oligonucleotides may be blunt-ended or may comprise a 3′ overhang of from 1-5 nucleotides of at least one or both of the strands. Other configurations of the oligonucleotide are known in the field and are contemplated herein. In embodiments of the method the polynucleotides include double-stranded DNA formed by intramolecular hybridization, double-stranded DNA formed by intermolecular hybridization, double-stranded RNA formed by intramolecular hybridization, or double-stranded RNA formed by intermolecular hybridization. In one embodiment the polynucleotides include single-stranded DNA or single-stranded RNA that self-hybridizes to form a hairpin structure having an at least partially double-stranded structure including at least one segment that will hybridize to RNA transcribed from the gene targeted for suppression. Not intending to be bound by any mechanism, it is believed that such polynucleotides are or will produce single-stranded RNA with at least one segment that will hybridize to RNA transcribed from the gene targeted for suppression. In certain other embodiments the polynucleotides further includes a promoter, generally a promoter functional in a plant, for example, a pol II promoter, a pol III promoter, a pol IV promoter, or a pol V promoter.

[0038] The term “gene” refers to components that comprise chromosomal DNA, plasmid DNA, cDNA, intron and exon DNA, artificial DNA polynucleotide, or other DNA that encodes a peptide, polypeptide, protein, or RNA transcript molecule, and the genetic elements flanking the coding sequence that are involved in the regulation of expression, such as, promoter regions, 5′ leader regions, 3′ untranslated region that may exist as native genes or transgenes in a plant genome. The gene or a fragment thereof is isolated and subjected to polynucleotide sequencing methods that determines the order of the nucleotides that comprise the gene. Any of the components of the gene are potential targets for a trigger oligonucleotide and polynucleotides.

[0039] The trigger polynucleotide molecules are designed to modulate expression by inducing regulation or suppression of an endogenous EPSPS gene in a plant and are designed to have a nucleotide sequence essentially identical or essentially complementary to the nucleotide sequence of an endogenous EPSPS gene of a plant or to the sequence of RNA transcribed from an endogenous EPSPS gene of a plant, the sequence thereof determined by isolating the gene or a fragment of the gene from the plant, which can be coding sequence or non-coding sequence. Effective molecules that modulate expression are referred to as “a trigger molecule, or trigger polynucleotide”. By “essentially identical” or “essentially complementary” is meant that the trigger polynucleotides (or at least one strand of a double-stranded polynucleotide or portion thereof, or a portion of a single strand polynucleotide) are designed to hybridize to the endogenous gene noncoding sequence or to RNA transcribed (known as messenger RNA or an RNA transcript) from the endogenous gene to effect regulation or suppression of expression of the endogenous gene. Trigger molecules are identified by “tiling” the gene targets with partially overlapping probes or non-overlapping probes of antisense or sense polynucleotides that are essentially identical or essentially complementary to the nucleotide sequence of an endogenous gene. Multiple target sequences can be aligned and sequence regions with homology in common, according to the methods, are identified as potential trigger molecules for the multiple targets. Multiple trigger molecules of various lengths, for example 18-25 nucleotides, 26-50 nucleotides, 51-100 nucleotides, 101-200 nucleotides, 201-300 nucleotides or more can be pooled into a few treatments in order to investigate polynucleotide molecules that cover a portion of a gene sequence (for example, a portion of a coding versus a portion of a noncoding region, or a 5′ versus a 3′ portion of a gene) or an entire gene sequence including coding and noncoding regions of a target gene. Polynucleotide molecules of the pooled trigger molecules can be divided into smaller pools or single molecules in order to identify trigger molecules that provide the desired effect.

[0040] The target gene RNA and DNA polynucleotide molecules (Table 1, SEQ ID NO:1-120) are sequenced by any number of available methods and equipment. Some of the sequencing technologies are available commercially, such as the sequencing-by-hybridization platform from Affymetrix Inc. (Sunnyvale, Calif.) and the sequencing-by-synthesis platforms from 454 Life Sciences (Bradford, Conn.), Illumina/Solexa (Hayward, Calif.) and Helicos Biosciences (Cambridge, Mass.), and the sequencing-by-ligation platform from Applied Biosystems (Foster City, Calif.), as described below. In addition to the single molecule sequencing performed using sequencing-by-synthesis of Helicos Biosciences, other single molecule sequencing technologies are encompassed and include the SMRT™. technology of Pacific Biosciences, the Ion Torrent™. technology, and nanopore sequencing being developed for example, by Oxford Nanopore Technologies. An EPSPS target gene comprising DNA or RNA can be isolated using primers or probes essentially complementary or essentially homologous to SEQ ID NO:1-120 or a fragment thereof. A polymerase chain reaction (PCR) gene fragment can be produced using primers essentially complementary or essentially homologous to SEQ ID NO:1-120 or a fragment thereof that is useful to isolate an EPSPS gene from a plant genome. SEQ ID NO: 1-120 or fragments thereof can be used in various sequence capture technologies to isolate additional target gene sequences, for example, including but not limited to Roche NimbleGen® (Madison, Wis.) and Streptavdin-coupled Dynabeads® (Life Technologies, Grand Island, N.Y.) and US20110015084, herein incorporated by reference in its entirety.

[0041] Embodiments of functional single-stranded polynucleotides have sequence complementarity that need not be 100 percent, but is at least sufficient to permit hybridization to RNA transcribed from the target gene or DNA of the target gene to form a duplex to permit a gene silencing mechanism. Thus, in embodiments, a polynucleotide fragment is designed to be essentially identical to, or essentially complementary to, a sequence of 18 or more contiguous nucleotides in either the target EPSPS gene sequence or messenger RNA transcribed from the target gene. By “essentially identical” is meant having 100 percent sequence identity or at least about 83, 84, 85, 86, 87, 88, 89, 90, 91, 92, 93, 94, 95, 96, 97, 98, or 99 percent sequence identity when compared to the sequence of 18 or more contiguous nucleotides in either the target gene or RNA transcribed from the target gene; by “essentially complementary” is meant having 100 percent sequence complementarity or at least about 83, 84, 85, 86, 87, 88, 89, 90, 91, 92, 93, 94, 95, 96, 97, 98, or 99 percent sequence complementarity when compared to the sequence of 18 or more contiguous nucleotides in either the target gene or RNA transcribed from the target gene. In some embodiments, polynucleotide molecules are designed to have 100 percent sequence identity with or complementarity to one allele or one family member of a given target gene (coding or non-coding sequence of a gene); in other embodiments the polynucleotide molecules are designed to have 100 percent sequence identity with or complementarity to multiple alleles or family members of a given target gene.

[0042] “Identity” refers to the degree of similarity between two polynucleic acid or protein sequences. An alignment of the two sequences is performed by a suitable computer program. A widely used and accepted computer program for performing sequence alignments is CLUSTALW v1.6 (Thompson, et al. Nucl. Acids Res., 22: 4673-4680, 1994). The number of matching bases or amino acids is divided by the total number of bases or amino acids, and multiplied by 100 to obtain a percent identity. For example, if two 580 base pair sequences had 145 matched bases, they would be 25 percent identical. If the two compared sequences are of different lengths, the number of matches is divided by the shorter of the two lengths. For example, if there are 100 matched amino acids between a 200 and a 400 amino acid protein, they are 50 percent identical with respect to the shorter sequence. If the shorter sequence is less than 150 bases or 50 amino acids in length, the number of matches are divided by 150 (for nucleic acid bases) or 50 (for amino acids), and multiplied by 100 to obtain a percent identity.

[0043] Trigger molecules for specific gene family members can be identified from coding and/or non-coding sequences of gene families of a plant or multiple plants, by aligning and selecting 200-300 polynucleotide fragments from the least homologous regions amongst the aligned sequences and evaluated using topically applied polynucleotides (as sense or anti-sense ssDNA or ssRNA, dsRNA, or dsDNA) to determine their relative effectiveness in providing the herbicidal phenotype. The effective segments are further subdivided into 50-60 polynucleotide fragments, prioritized by least homology, and reevaluated using topically applied polynucleotides. The effective 50-60 polynucleotide fragments are subdivided into 19-30 polynucleotide fragments, prioritized by least homology, and again evaluated for induction of the herbicidal phenotype. Once relative effectiveness is determined, the fragments are utilized singly, or again evaluated in combination with one or more other fragments to determine the trigger composition or mixture of trigger polynucleotides for providing the herbicidal phenotype.

[0044] Trigger molecules for broad activity can be identified from coding and/or non-coding sequences of gene families of a plant or multiple plants, by aligning and selecting 200-300 polynucleotide fragments from the most homologous regions amongst the aligned sequences and evaluated using topically applied polynucleotides (as sense or anti-sense ssDNA or ssRNA, dsRNA, or dsDNA) to determine their relative effectiveness in inducing the herbicidal phenotype. The effective segments are subdivided into 50-60 polynucleotide fragments, prioritized by most homology, and reevaluated using topically applied polynucleotides. The effective 50-60 polynucleotide fragments are subdivided into 19-30 polynucleotide fragments, prioritized by most homology, and again evaluated for induction of the herbicidal phenotype. Once relative effectiveness is determined, the fragments may be utilized singly, or in combination with one or more other fragments to determine the trigger composition or mixture of trigger polynucleotides for providing the herbicidal phenotype.

[0045] Methods of making polynucleotides are well known in the art. Chemical synthesis, in vivo synthesis and in vitro synthesis methods and compositions are known in the art and include various viral elements, microbial cells, modified polymerases, and modified nucleotides. Commercial preparation of oligonucleotides often provides two deoxyribonucleotides on the 3′ end of the sense strand. Long polynucleotide molecules can be synthesized from commercially available kits, for example, kits from Applied Biosystems/Ambion (Austin, Tex.) have DNA ligated on the 5′ end in a microbial expression cassette that includes a bacterial T7 polymerase promoter that makes RNA strands that can be assembled into a dsRNA and kits provided by various manufacturers that include T7 RiboMax Express (Promega, Madison, Wis.), AmpliScribe T7-Flash (Epicentre, Madison, Wis.), and TranscriptAid T7 High Yield (Fermentas, Glen Burnie, Md.). dsRNA molecules can be produced from microbial expression cassettes in bacterial cells (Ongvarrasopone et al. ScienceAsia 33:35-39; Yin, Appl. Microbiol. Biotechnol. 84:323-333, 2009; Liu et al., BMC Biotechnology 10:85, 2010) that have regulated or deficient RNase III enzyme activity or the use of various viral vectors to produce sufficient quantities of dsRNA. EPSPS gene fragments are inserted into the microbial expression cassettes in a position in which the fragments are express to produce ssRNA or dsRNA useful in the methods described herein to regulate expression on a target EPSPS gene. Long polynucleotide molecules can also be assembled from multiple RNA or DNA fragments. In some embodiments design parameters such as Reynolds score (Reynolds et al. Nature Biotechnology 22, 326-330 (2004) Tuschl rules (Pei and Tuschl, Nature Methods 3(9): 670-676, 2006), i-score (Nucleic Acids Res 35: e123, 2007), i-Score Designer tool and associated algorithms (Nucleic Acids Res 32: 936-948, 2004. Biochem Biophys Res Commun 316: 1050-1058, 2004, Nucleic Acids Res 32: 893-901, 2004, Cell Cycle 3: 790-5, 2004, Nat Biotechnol 23: 995-1001, 2005, Nucleic Acids Res 35: e27, 2007, BMC Bioinformatics 7: 520, 2006, Nucleic Acids Res 35: e123, 2007, Nat Biotechnol 22: 326-330, 2004) are known in the art and may be used in selecting polynucleotide sequences effective in gene silencing. In some embodiments the sequence of a polynucleotide is screened against the genomic DNA of the intended plant to minimize unintentional silencing of other genes.

[0046] Ligands can be tethered to a polynucleotide, for example a dsRNA, ssRNA, dsDNA or ssDNA. Ligands in general can include modifiers, e.g., for enhancing uptake; diagnostic compounds or reporter groups e.g., for monitoring distribution; cross-linking agents; nuclease-resistance conferring moieties; and natural or unusual nucleobases. General examples include lipophiles, lipids (e.g., cholesterol, a bile acid, or a fatty acid (e.g., lithocholic-oleyl, lauroyl, docosnyl, stearoyl, palmitoyl, myristoyl oleoyl, linoleoyl), steroids (e.g., uvaol, hecigenin, diosgenin), terpenes (e.g., triterpenes, e.g., sarsasapogenin, Friedelin, epifriedelanol derivatized lithocholic acid), vitamins (e.g., folic acid, vitamin A, biotin, pyridoxal), carbohydrates, proteins, protein binding agents, integrin targeting molecules, polycationics, peptides, polyamines, and peptide mimics. The ligand may also be a recombinant or synthetic molecule, such as a synthetic polymer, e.g., polyethylene glycol (PEG), PEG-40K, PEG-20K and PEG-5K. Other examples of ligands include lipophilic molecules, e.g, cholesterol, cholic acid, adamantane acetic acid, 1-pyrene butyric acid, dihydrotestosterone, glycerol (e.g., esters and ethers thereof, e.g., C.sub.10, C.sub.11, C.sub.12, C.sub.13, C.sub.14, C.sub.15, C.sub.16, C.sub.17, C.sub.18, C.sub.19, or C.sub.20 alkyl; e.g., lauroyl, docosnyl, stearoyl, oleoyl, linoleoyl 1,3-bis-0(hexadecyl)glycerol, 1,3-bis-O(octaadecyl)glycerol), geranyloxyhexyl group, hexadecylglycerol, borneol, menthol, 1,3-propanediol, heptadecyl group, palmitic acid, myristic acid, O3-(oleoyl)lithocholic acid, O3-(oleoyl)cholenic acid, dodecanoyl, lithocholyl, 5.beta.-cholanyl, N,N-distearyl-lithocholamide, 1,2-di-O-stearoylglyceride, dimethoxytrityl, or phenoxazine) and PEG (e.g., PEG-5K, PEG-20K, PEG-40K). Preferred lipophilic moieties include lipid, cholesterols, oleyl, retinyl, or cholesteryl residues.

[0047] Conjugating a ligand to a dsRNA can enhance its cellular absorption, lipophilic compounds that have been conjugated to oligonucleotides include 1-pyrene butyric acid, 1,3-bis-O-(hexadecyl)glycerol, and menthol. One example of a ligand for receptor-mediated endocytosis is folic acid. Folic acid enters the cell by folate-receptor-radiated endocytosis. dsRNA compounds bearing folic acid would be efficiently transported into the cell via the folate-receptor-mediated endocytosis. Other ligands that have been conjugated to oligonucleotides include polyethylene glycols, carbohydrate clusters, cross-linking agents, porphyrin conjugates, delivery peptides and lipids such as cholesterol. In certain instances, conjugation of a cationic ligand to oligonucleotides results in improved resistance to nucleases. Representative examples of cationic ligands are propylammonium and dimethylpropylammonium. Interestingly, antisense oligonucleotides were reported to retain their high binding affinity to mRNA when the cationic ligand was dispersed, throughout the oligonucleotide. See M. Manoharan Antisense & Nucleic Acid Drug Development 2002, 12, 103 and references therein.

[0048] A biologic delivery can be accomplished by a variety of methods including, without limitation, (1) loading liposomes with a dsRNA acid molecule provided herein and (2) complexing a dsRNA molecule with lipids or liposomes to form nucleic acid-lipid or nucleic acid-liposome complexes. The liposome can be composed of cationic and neutral lipids commonly used to transfect cells in vitro. Cationic lipids can complex (e.g., charge-associate) with negatively charged, nucleic acids to form liposomes. Examples of cationic liposomes include, without limitation, lipofectin, lipofectamine, lipofectace, and DOTAP. Procedures for forming liposomes are well known in the art. Liposome compositions can be formed, for example, from phosphatidylcholine, dimyristoyl phosphatidylcholine, dipalmitoyl phosphatidylcholine, dimyristoyl phosphatidyl glycerol, dioleoyl phosphatidylethanolamine or liposomes comprising dihydrosphingomyelin (DHSM) Numerous lipophilic agents are commercially available, including Lipofectin® (Invitrogen/Life Technologies, Carlsbad, Calif.) and Effectene™ (Qiagen, Valencia, Calif.), In addition, systemic delivery methods can be optimized using commercially available cationic lipids such as DDAB or DOTAP, each of which can be mixed with a neutral lipid such as DOPE or cholesterol. In some eases, liposomes such as those described by Templeton et al. (Nature Biotechnology, 15:647-652 (1997)) can be used. In other embodiments, polycations such as polyethyleneimine can be used to achieve delivery in vivo and ex vivo (Boletta et al., J. Am. Soc. Nephrol. 7:1728 (1996)). Additional information regarding the use of liposomes to deliver nucleic acids can be found in U.S. Pat. No. 6,271,359, PCT Publication WO 96/40964 and Morrissey, D. et al. 2005. Nat. Biotechnol. 23(8):1002-7.

[0049] In certain embodiments, an organosilicone preparation that is commercially available as Silwet® L-77 surfactant having CAS Number 27306-78-1 and EPA Number: CAL.REG.NO. 5905-50073-AA, and currently available from Momentive Performance Materials, Albany, N.Y. can be used to prepare a polynucleotide composition. In certain embodiments where a Silwet L-77 organosilicone preparation is used as a pre-spray treatment of plant leaves or other plant surfaces, freshly made concentrations in the range of about 0.015 to about 2 percent by weight (wt percent) (e.g., about 0.01, 0.015, 0.02, 0.025, 0.03, 0.035, 0.04, 0.045, 0.05, 0.055, 0.06, 0.065, 0.07, 0.075, 0.08, 0.085, 0.09, 0.095, 0.1, 0.2, 0.3, 0.4, 0.5, 0.6, 0.7, 0.8, 0.9, 1.0, 1.1, 1.2, 1.3, 1.4, 1.5, 1.6, 1.7, 1.8, 1.9, 2.0, 2.1, 2.2, 2.3, 2.5 wt percent) are efficacious in preparing a leaf or other plant surface for transfer of polynucleotide molecules into plant cells from a topical application on the surface. In certain embodiments of the methods and compositions provided herein, a composition that comprises a polynucleotide molecule and an organosilicone preparation comprising Silwet L-77 in the range of about 0.015 to about 2 percent by weight (wt percent) (e.g., about 0.01, 0.015, 0.02, 0.025, 0.03, 0.035, 0.04, 0.045, 0.05, 0.055, 0.06, 0.065, 0.07, 0.075, 0.08, 0.085, 0.09, 0.095, 0.1, 0.2, 0.3, 0.4, 0.5, 0.6, 0.7, 0.8, 0.9, 1.0, 1.1, 1.2, 1.3, 1.4, 1.5, 1.6, 1.7, 1.8, 1.9, 2.0, 2.1, 2.2, 2.3, 2.5 wt percent) is used or provided.

[0050] In certain embodiments, any of the commercially available organosilicone preparations provided such as the following Breakthru S 321, Breakthru S 200 Cat#67674-67-3, Breakthru OE 441 Cat#68937-55-3, Breakthru S 278 Cat #27306-78-1, Breakthru S 243, Breakthru S 233 Cat#134180-76-0, available from manufacturer Evonik Goldschmidt (Germany), Silwet® HS 429, Silwet® HS 312, Silwet® HS 508, Silwet® HS 604 (Momentive Performance Materials, Albany, N.Y.) can be used as transfer agents in a polynucleotide composition. In certain embodiments where an organosilicone preparation is used as a pre-spray treatment of plant leaves or other surfaces, freshly made concentrations in the range of about 0.015 to about 2 percent by weight (wt percent) (e.g., about 0.01, 0.015, 0.02, 0.025, 0.03, 0.035, 0.04, 0.045, 0.05, 0.055, 0.06, 0.065, 0.07, 0.075, 0.08, 0.085, 0.09, 0.095, 0.1, 0.2, 0.3, 0.4, 0.5, 0.6, 0.7, 0.8, 0.9, 1.0, 1.1, 1.2, 1.3, 1.4, 1.5, 1.6, 1.7, 1.8, 1.9, 2.0, 2.1, 2.2, 2.3, 2.5 wt percent) are efficacious in preparing a leaf or other plant surface for transfer of polynucleotide molecules into plant cells from a topical application on the surface. In certain embodiments of the methods and compositions provided herein, a composition that comprises a polynucleotide molecule and an organosilicone preparation in the range of about 0.015 to about 2 percent by weight (wt percent) (e.g., about 0.01, 0.015, 0.02, 0.025, 0.03, 0.035, 0.04, 0.045, 0.05, 0.055, 0.06, 0.065, 0.07, 0.075, 0.08, 0.085, 0.09, 0.095, 0.1, 0.2, 0.3, 0.4, 0.5, 0.6, 0.7, 0.8, 0.9, 1.0, 1.1, 1.2, 1.3, 1.4, 1.5, 1.6, 1.7, 1.8, 1.9, 2.0, 2.1, 2.2, 2.3, 2.5 wt percent) is used or provided.

[0051] Organosilicone preparations used in the methods and compositions provided herein can comprise one or more effective organosilicone compounds. As used herein, the phrase “effective organosilicone compound” is used to describe any organosilicone compound that is found in an organosilicone preparation that enables a polynucleotide to enter a plant cell. In certain embodiments, an effective organosilicone compound can enable a polynucleotide to enter a plant cell in a manner permitting a polynucleotide mediated suppression of a target gene expression in the plant cell. In general, effective organosilicone compounds include, but are not limited to, compounds that can comprise: i) a trisiloxane head group that is covalently linked to, ii) an alkyl linker including, but not limited to, an n-propyl linker, that is covalently linked to, iii) a poly glycol chain, that is covalently linked to, iv) a terminal group. Trisiloxane head groups of such effective organosilicone compounds include, but are not limited to, heptamethyltrisiloxane. Alkyl linkers can include, but are not limited to, an n-propyl linker Poly glycol chains include, but are not limited to, polyethylene glycol or polypropylene glycol. Poly glycol chains can comprise a mixture that provides an average chain length “n” of about “7.5”. In certain embodiments, the average chain length “n” can vary from about 5 to about 14. Terminal groups can include, but are not limited to, alkyl groups such as a methyl group. Effective organosilicone compounds are believed to include, but are not limited to, trisiloxane ethoxylate surfactants or polyalkylene oxide modified heptamethyl trisiloxane.

[chemical structure]

[0052] In certain embodiments, an organosilicone preparation that comprises an organosilicone compound comprising a trisiloxane head group is used in the methods and compositions provided herein. In certain embodiments, an organosilicone preparation that comprises an organosilicone compound comprising a heptamethyltrisiloxane head group is used in the methods and compositions provided herein. In certain embodiments, an organosilicone composition that comprises Compound I is used in the methods and compositions provided herein. In certain embodiments, an organosilicone composition that comprises Compound I is used in the methods and compositions provided herein. In certain embodiments of the methods and compositions provided herein, a composition that comprises a polynucleotide molecule and one or more effective organosilicone compound in the range of about 0.015 to about 2 percent by weight (wt percent) (e.g., about 0.01, 0.015, 0.02, 0.025, 0.03, 0.035, 0.04, 0.045, 0.05, 0.055, 0.06, 0.065, 0.07, 0.075, 0.08, 0.085, 0.09, 0.095, 0.1, 0.2, 0.3, 0.4, 0.5, 0.6, 0.7, 0.8, 0.9, 1.0, 1.1, 1.2, 1.3, 1.4, 1.5, 1.6, 1.7, 1.8, 1.9, 2.0, 2.1, 2.2, 2.3, 2.5 wt percent) is used or provided.

[0053] Compositions include but are not limited components that are one or more polynucleotides essentially identical to, or essentially complementary to an EPSPS gene sequence (promoter, intron, exon, 5′ untranslated region, 3′ untranslated region), a transfer agent that provides for the polynucleotide to enter a plant cell, a herbicide that complements the action of the polynucleotide, one or more additional herbicides that further enhance the herbicide activity of the composition or provide an additional mode of action different from the complementing herbicide, various salts and stabilizing agents that enhance the utility of the composition as an admixture of the components of the composition.

[0054] In certain aspects, methods include one or more applications of a polynucleotide composition and one or more applications of a transfer agent for conditioning of a plant to permeation by polynucleotides. When the agent for conditioning to permeation is an organosilicone composition or compound contained therein, embodiments of the polynucleotide molecules are double-stranded RNA oligonucleotides, single-stranded RNA oligonucleotides, double-stranded RNA polynucleotides, single-stranded RNA polynucleotides, double-stranded DNA oligonucleotides, single-stranded DNA oligonucleotides, double-stranded DNA polynucleotides, single-stranded DNA polynucleotides, chemically modified RNA or DNA oligonucleotides or polynucleotides or mixtures thereof.

[0055] Compositions and methods are useful for modulating the expression of an endogenous EPSPS gene or transgenic EPSPS gene (for example, CP4 EPSPS, U.S. Pat. No. RE39,247 and 2mEPSPS, U.S. Pat. No. 6,040,497) gene in a plant cell. In various embodiments, an EPSPS gene includes coding (protein-coding or translatable) sequence, non-coding (non-translatable) sequence, or both coding and non-coding sequence. Compositions can include polynucleotides and oligonucleotides designed to target multiple genes, or multiple segments of one or more genes. The target gene can include multiple consecutive segments of a target gene, multiple non-consecutive segments of a target gene, multiple alleles of a target gene, or multiple target genes from one or more species.

[0056] Provided is a method for modulating expression of an EPSPS gene in a plant including (a) conditioning of a plant to permeation by polynucleotides and (b) treatment of the plant with the polynucleotide molecules, wherein the polynucleotide molecules include at least one segment of 18 or more contiguous nucleotides cloned from or otherwise identified from the target EPSPS gene in either anti-sense or sense orientation, whereby the polynucleotide molecules permeate the interior of the plant and induce modulation of the target gene. The conditioning and polynucleotide application can be performed separately or in a single step. When the conditioning and polynucleotide application are performed in separate steps, the conditioning can precede or can follow the polynucleotide application within minutes, hours, or days. In some embodiments more than one conditioning step or more than one polynucleotide molecule application can be performed on the same plant. In embodiments of the method, the segment can be cloned or identified from (a) coding (protein-encoding), (b) non-coding (promoter and other gene related molecules), or (c) both coding and non-coding parts of the target gene. Non-coding parts include DNA, such as promoter regions or the RNA transcribed by the DNA that provide RNA regulatory molecules, including but not limited to: introns, 5′ or 3′ untranslated regions, and microRNAs (miRNA), trans-acting siRNAs, natural anti-sense siRNAs, and other small RNAs with regulatory function or RNAs having structural or enzymatic function including but not limited to: ribozymes, ribosomal RNAs, t-RNAs, aptamers, and riboswitches.

[0057] All publications, patents and patent applications are herein incorporated by reference to the same extent as if each individual publication or patent application was specifically and individually indicated to be incorporated by reference.

[0058] The following examples are included to demonstrate examples of certain preferred embodiments. It should be appreciated by those of skill in the art that the techniques disclosed in the examples that follow represent approaches the inventors have found function well in the practice, and thus can be considered to constitute examples of preferred modes for its practice. However, those of skill in the art should, in light of the present disclosure, appreciate that many changes can be made in the specific embodiments that are disclosed and still obtain a like or similar result without departing from the spirit and scope.

### EXAMPLES

### Example 1

### Polynucleotides Related to the EPSPS Gene Sequences

[0059] The target EPSPS gene polynucleotide molecules have been found that naturally occur in the genome of Amaranthus palmeri, Amaranthus rudis, Amaranthus graecizans, Amaranthus hybridus, Amaranthus lividus, Amaranthus spinosus, Amaranthus thunbergii, Amaranthus viridis, Lolium multiflorum, Lolium rigidium, Ambrosia artemisiifolia, Ambrosia trifida, Euphorbia heterophylla, Kochia scoparia, Abutilon theophrasti, Sorghum halepense, Chenopodium album, Commelina diffusa, Conyza candensis, Digitaria sanguinalis, and include molecules related to the expression of a polypeptide identified as an EPSPS, that include regulatory molecules, cDNAs comprising coding and noncoding regions of an EPSPS gene and fragments of the plant genes thereof as shown in Table 1. Additionally, the EPSPS gene coding sequence isolated from Agrobacterium tumefaciens that encodes for a glyphosate resistant EPSPS enzyme and that is commonly used to produce glyphosate resistant crop plants is shown in SEQ ID NO: 1 in Table 1.

[0060] Polynucleotide molecules were extracted from these plant species by methods standard in the field, for example, total RNA was extracted using Trizol Reagent (Invitrogen Corp, Carlsbad, Calif. Cat. No. 15596-018), following the manufacturer's protocol or modifications thereof by those skilled in the art of polynucleotide extraction that may enhance recover or purity of the extracted RNA. Briefly, start with 1 gram of ground plant tissue for extraction. Prealiquot 10 milliliters (mL) Trizol reagent to 15 mL conical tubes. Add ground powder to tubes and shake to homogenize. Incubate the homogenized samples for 5 minutes (min) at room temperature (RT) and then add 3 mL of chloroform. Shakes tubes vigorously by hand for 15-30 seconds(sec) and incubate at RT for 3 min. Centrifuge the tubes at 7,000 revolutions per minute (rpm) for 10 min at 4 degrees C. Transfer the aqueous phase to a new 1.5 mL tube and add 1 volume of cold isopropanol. Incubate the samples for 20-30 min at RT and centrifuge at 10,000 rpm for 10 min at 4 degrees C. Wash pellet with Sigma-grade 80 percent ethanol. Remove the supernatant and briefly air-dry the pellet. Dissolve the RNA pellet in approximately 200 microliters of DEPC treated water. Heat briefly at 65 degrees C. to dissolve pellet and vortex or pipet to resuspend RNA pellet. Adjust RNA concentraiton to 1-2 microgram/microliter.

[0061] DNA was extracted using EZNA SP Plant DNA Mini kit (Omega Biotek, Norcross Ga., Cat#D5511) and Lysing Matrix E tubes (Q-Biogen, Cat#6914), following the manufacturer's protocol or modifications thereof by those skilled in the art of polynucleotide extraction that may enhance recover or purity of the extracted DNA. Briefly, aliquot ground tissue to a Lysing Matrix E tube on dry ice, add 800 μl Buffer SP1 to each sample, homogenize in a bead beater for 35-45 sec, incubate on ice for 45-60 sec, centrifuge at ≧14000 rpm for 1 min at RT, add 10 microliter RNase A to the lysate, incubate at 65° C. for 10 min, centrifuge for 1 min at RT, add 280 μl Buffer SP2 and vortex to mix, incubate the samples on ice for 5 min, centrifuge at ≧10,000 g for 10 min at RT, transfer the supernatant to a homogenizer column in a 2 ml collection tube, centrifuge at 10,000 g for 2 min at RT, transfer the cleared lysate into a 1.5 ml microfuge tube, add 1.5 volumes Buffer SP3 to the cleared lysate, vortex immediately to obtain a homogeneous mixture, transfer up to 650 μl supernatant to the Hi-Bind column, centrifuge at 10,000 g for 1 min, repeat, apply 100 μl 65° C. Elution Buffer to the column, centrifuge at 10,000 g for 5 min at RT.

[0062] Next-generation DNA sequencers, such as the 454-FLX (Roche, Branford, Conn.), the SOLiD (Applied Biosystems), and the Genome Analyzer (HiSeq2000, Illumina, San Diego, Calif.) were used to provide polynucleotide sequence from the DNA and RNA extracted from the plant tissues. Raw sequence data was assembled into contigs as illustrated in Table 1 and SEQ ID NO: 2-120. The contig sequence was used to identify trigger molecules that can be applied to the plant to enable regulation of the gene expression.

### Example 2

### Polynucleotides Related to the Trigger Molecules

[0063] The gene sequences and fragments of Table 1 were divided into 200 polynucleotide (200-mer) lengths with 25 polynucleotide overlapping regions (SEQ ID NO:121-3222). These polynucleotides are tested to select the most efficacious trigger regions across the length of any target sequence. The trigger polynucleotides are constructed as sense or anti-sense ssDNA or ssRNA, dsRNA, or dsDNA, or dsDNA/RNA hybrids and combined with an organosilicone based transfer agent to provide a polynucleotide preparation. The polynucleotides are combined into sets of two to three polynucleotides per set, using 4-8 nmol of each polynucleotide. Each polynucleotide set is prepared with the transfer agent and applied to a plant or a field of plants in combination with a glyphosate containing herbicide, or followed by a glyphosate treatment one to three days after the polynucleotide application, to determine the effect on the plant's susceptibility to glyphosate. The effect is measured as stunting the growth and/or killing of the plant and is measured 8-14 days after treatment with the polynucleotide set and glyphosate. The most efficacious sets are identified and the individual polynucleotides are tested in the same methods as the sets are and the most efficacious single 200-mer identified. The 200-mer sequence is divided into smaller sequences of 50-70-mer regions with 10-15 polynucleotide overlapping regions and the polynucleotides tested individually. The most efficacious 50-70-mer is further divided into smaller sequences of 25-mer regions with a 12 to 13 polynucleotide overlapping region and tested for efficacy in combination with glyphosate treatment. By this method it is possible to identify an oligonucleotide or several oligonucleotides that are the most efficacious trigger molecule to effect plant sensitivity to glyphosate or modulation of EPSPS gene expression. The modulation of EPSPS gene expression is determined by the detection of EPSPS siRNA molecules specific to EPSPS gene or by an observation of a reduction in the amount of EPSPS RNA transcript produced relative to an untreated plant or by merely observing the anticipated phenotype of the application of the trigger with the glyphosate containing herbicide. Detection of siRNA can be accomplished, for example, using kits such as mirVana (Ambion, Austin Tex.) and mirPremier (Sigma-Aldrich, St Louis, Mo.).

[0064] The gene sequences and fragments of Table 1 were compared and 21-mers of contiguous polynucleotides were identified that have homology across the various EPSPS gene sequences (SEQ ID NO: 1-120). The purpose was to identify trigger molecules that are useful as herbicidal molecules or in combination with glyphosate herbicide enhance effective weed control across a broad range of weed species including glyphosate resistant weed biotypes. SEQ ID NO: 3223-3542 represent the 21-mers that are present in the EPSPS gene of at least eight of the weed species of Table 1. It is contemplated that additional 21-mers can be selected from the sequences of Table 1 that are specific for a single weed species or a few weeds species within a genus or trigger molecules that are at least 18 contiguous nucleotides, at least 19 contiguous nucleotides, at least 20 contiguous nucleotides or at least 21 contiguous nucleotides in length and at least 85 percent identical to an EPSPS gene sequence selected from the group consisting of SEQ ID NO:1-120 or fragments thereof. The 21-mer oligonucleotides are combined into a 6-12 oligonucleotide set and tested for efficacy against the broadest range of weed species in which the oligonucleotide is essentially identical or essentially complementary to the EPSPS gene sequence in the genome of the weed species. Efficacious sets are divided into smaller sets of 2-3 oligonucleotides and tested for efficacy. Each polynucleotide set is prepared with the transfer agent and applied to a plant or a field of plants in combination with a glyphosate containing herbicide, or followed by a glyphosate treatment one to three days after the oligonucleotide application, to determine the effect in the plant's susceptibility to glyphosate. The effect is measured as stunting the growth and/or killing of the plant and is measured 8-14 days after treatment with the polynucleotide set and glyphosate.

[0065] By this method it is possible to identify an oligonucleotide or several oligonucleotides that are the most efficacious trigger molecule to effect plant sensitivity to glyphosate or modulation of EPSPS gene expression. The modulation of EPSPS gene expression is determined by the detection of EPSPS siRNA molecules specific to EPSPS gene or by an observation of a reduction in the amount of EPSPS RNA transcript produced relative to an untreated plant. Detection of siRNA can be accomplished, for example, using kits such as mirVana (Ambion, Austin Tex.) and mirPremier (Sigma-Aldrich, St Louis, Mo.).

### Example 3

### Methods Related to Treating Plants or Plant Parts with a Topical Mixture of the Modified Trigger Oligonucleotide Molecules

[0066] Single stranded or double stranded DNA or RNA fragments in sense or antisense orientation or both were identified and mixed with a transfer agent and other components in the composition. This composition was topically applied to plants to effect expression of the target EPSPS genes in the specified plant to obtain the desired effect on growth or development.

[0067] In this example, growing Amaranthus palmeri plants were treated with a topically applied composition for inducing modulation of a target gene in a plant including (a) an agent for conditioning of a plant to permeation by polynucleotides and (b) polynucleotides including at least one polynucleotide strand including at least one segment of 17-25 contiguous nucleotides of the target gene in either anti-sense (AS) or sense (S) orientation. Amaranthus palmeri plants were treated with a topically applied adjuvant solution comprising dsRNA, ssDNA, and DNA/RNA hybrid polynucleotides shown in Table 2 (SEQ ID NO: 3544-3587, respectively) essentially homologous or essentially complementary to the Amaranthus palmeri EPSPS coding sequence. The polynucleotide sequences of the trigger molecules used in each treatment are shown in column 2. The trigger molecules, 5.2-RNA-M1 through M6 are modified for mismatch nucleotides (n) relative to 5.2.RNA-wt (wildtype). The type of polynucleotide for each trigger is shown in column 3, its' length in column 4 and the results observed in column 5. The results are expressed as a relative measure of activity, the tested oligonucleotide was either active, less active, or inactive in the bioassay.

[0068] A trigger sequence was identified to target the EPSPS promoter of glyphosate resistant Amaranthus palmeri and tests conducted to determine some activities of the trigger identified as AS83 (SEQ ID NO: 3670). The trigger sequence was made as ssDNA, dsDNA or dsRNA and various 3′ and 5′ deletions of AS83 were tested along with internal mismatch mutations. The following procedure was used for all assays described in this example. Approximately four-week old Amaranthus palmeri plants (glyphosate-resistant Palmer amaranth, “R-22”) were used in this assay. Plants were treated with 0.1% Silwet L-77 solution freshly made with ddH2O. Two fully expanded leaves per plant (one cotyledon, one true leaf) awere treated with the polynucleotide/Silwet L-77 solution. Final concentration for each oligonucleotide or polynucleotide was 25 microM (in 0.01% Silwet L-77, 5 mM sodium phosphate buffer, pH 6.8) unless otherwise stated. Twenty microliters of the solution was applied to the top surface of each of the two pre-treated leaves to provide a total of 40 microliters (1 nmol oligonucleotide or polynucleotide) for each plant.

[0069] Spray solutions were prepared the same day as spraying. Single oligonucleotide molecules shown in Table 2 and Table 4 were applied at rates between 0.04 and 0.18 mg/ml in 20 mM potassium phosphate buffer (pH 6.8) are added to spray solutions 15 to 50 minutes before spraying. One-to-two-ml spray solutions were applied using a custom low-dead-volume sprayer (“milli applicator”) at 8-30 gpa (gallons per acre) to one-to-four inch tall plants. Treated plants were place in a greenhouse set for either a 26.7/21.1° C. or 29.4/21.1° C. 14/10 hour temperature and supplemental light schedule. The amount of response relative to unsprayed treatments was collected at various time intervals up to 21 days after treatment.

[0070] The current default spray nozzle used for all applications made with the track sprayer is the Turbo Teejet air induction nozzle (015) nozzle with air pressure set at a minimum of 20 psi (160 kpa). The height of the spray nozzle was 16-18 inches above top of plant material. Treatments were made when plants reach the desired size, height or leaf stage.

[0071] Application rates are chosen so as to achieve percent control ratings in the range of 50% at the lowest rate to 90% control at the highest rate. The rates in this control range provide the best possible efficacy comparisons among formulations, allowing separation of relative performance of test samples. The rate of glyphosate used in these studies is typically held constant at 1680 g ae/ha (grams acid equivalent/hectare). On occasion lower or higher rates may be necessary depending on test objectives. The rate structure used for a given test will be dependent on the environmental conditions at the time of spray application (time of year), the plant species being treated (highly susceptible or tough to kill) and age (or size) of plants to be treated.

[0072] These results illustrated in Table 2 shows that dsRNA, dsDNA and ssDNA were effective oligonucleotides trigger molecules for activity against EPSPS gene exon coding sequence and noncoding (promoter) sequence. Generally, 3 mismatches in a 21-mer or about 85 percent sequence homology can be tolerated, oligonucleotides shorter than 21 appear to have less activity in this assay Other modifications, such as the addition of some 3′ synthetic nucleotides (ddC and IdT) did not seem to be tolerated in this bioassay.

TABLE 2
Various polynucleotide types and modified sequence homologies

| | 2. Sequence (AS strand, unless | | | |
|---|---|---|---|---|
| 1. Oligo name | otherwise indicated) | 3. Type | 4. length | 5. Activity |
| 5.2-RNA-wt | GTC ATA GCA ACA TCT GGC | dsRNA | 21 | active |
| | ATT | | | |
| 5.2-DNA-wt | GTC ATA GCA ACA TCT GGC | dsDNA | 21 | active |
| | ATT | | | |
| 5.2-ssDNA-S | AAT GCC AGA TGT TGC TAT | ssDNA | 21 | less active |
| | GAC | | | |
| 5.2-ssDNA-AS | GTC ATA GCA ACA TCT GGC | ssDNA | 21 | less active |
| | ATT | | | |
| 5.2-sDNA/asRNA | GTC ATA GCA ACA TCT GGC | DNA/RNA | 21 | inactive |
| | ATT | hybrid | | |
| 5.2-asDNA/sRNA | GTC ATA GCA ACA TCT GGC | DNA/RNA | 21 | inactive |
| | ATT | hybrid | | |
| 5.2-RNA-5′-20 | TC ATA GCA ACA TCT GGC | dsRNA | 20 | active |
| | ATT | | | |
| 5.2-RNA-5′-19 | C ATA GCA ACA TCT GGC | dsRNA | 19 | less active |
| | ATT | | | |
| 5.2-RNA-5′-18 | ATA GCA ACA TCT GGC ATT | dsRNA | 18 | inactive |
| 5.2-RNA-M1 | GTC ATA GCA ACA TCT GGC | dsRNA | 21 | active |
| | AT [symbol] | | | |
| 5.2-RNA-M2 | GTC ATA GCA ACA TCT GGC | dsRNA | 21 | active |
| | A [symbol] | | | |
| 5.2-RNA-M3 | GTC ATA GCA A [symbol] A TCT GGC | dsRNA | 21 | inactive |
| | ATT | | | |
| 5.2-RNA-M4 | GTC ATA GCA [symbol] TCT GGC | dsRNA | 21 | less active |
| | ATT | | | |
| 5.2-RNA-M5 | GTC Aat GCA ACA TCT GGC | dsRNA | 21 | active |
| | ATT | | | |
| 5.2-RNA-M6 | GTC ATA GCA ACA TCT [symbol] C | dsRNA | 21 | active |
| | ATT | | | |
| 5.2-RNA-3′ddC | GTC ATA GCA ACA TCT GGC | dsRNA | 22 | inactive |
| | ATT-3′ddC | | | |
| 5.2-RNA-3′IdT | GTC ATA GCA ACA TCT GGC | dsRNA | 22 | inactive |
| | ATT-3′IdT | | | |
| 3′ Deletion | | | | |
| Analysis | | | | |
| AS83-DNA-25-wt | CTC TTT GTT TTT CTT CTG | ssDNA | 25 | active |
| | CCA ATT T | | | |
| AS83-DNA-24- | CTC TTT GTT TTT CTT CTG | ssDNA | 24 | active |
| 3′D | CCA ATT | | | |
| AS83-DNA-23- | CTC TTT GTT TTT CTT CTG | ssDNA | 23 | active |
| 3′D | CCA AT | | | |
| AS83-DNA-22- | CTC TTT GTT TTT CTT CTG | ssDNA | 22 | active |
| 3′D | CCA A | | | |
| AS83-DNA-21- | CTC TTT GTT TTT CTT CTG | ssDNA | 21 | active |
| 3′D | CCA | | | |
| AS83-DNA-20- | CTC TTT GTT TTT CTT CTG CC | ssDNA | 20 | active |
| 3′D | | | | |
| AS83-DNA-19- | CTC TTT GTT TTT CTT CTG C | ssDNA | 19 | inactive |
| 3′D | | | | |
| AS83-DNA-18- | CTC TTT GTT TTT CTT CTG | ssDNA | 18 | inactive |
| 3′D | | | | |
| AS83-DNA-17- | CTC TTT GTT TTT CTT CT | ssDNA | 17 | inactive |
| 3′D | | | | |
| 5′ Deletion | | | | |
| Analysis | | | | |
| AS83-DNA-24- | TCT TTG TTT TTC TTC TGC | ssDNA | 24 | active |
| 5′D | CAA TTT | | | |
| AS83-DNA-23- | CTT TGT TTT TCT TCT GCC | ssDNA | 23 | active |
| 5′D | AAT TT | | | |
| AS83-DNA-22- | TTT GTT TTT CTT CTG CCA | ssDNA | 22 | active |
| 5′D | ATT T | | | |
| AS83-DNA-21- | TTG TTT TTC TTC TGC CAA | ssDNA | 21 | active |
| 5′D | TTT | | | |
| AS83-DNA-20- | TTG TTT TTC TTC TGC CAA | ssDNA | 20 | active |
| 5′D | TT | | | |
| AS83-DNA-19- | TTG TTT TTC TTC TGC CAA T | ssDNA | 19 | less active |
| 5′D | | | | |
| AS83-DNA-18- | TTG TTT TTC TTC TGC CAA | ssDNA | 18 | inactive |
| 5′D | | | | |
| AS83-DNA-17- | TTG TTT TTC TTC TGC CA | ssDNA | 17 | inactive |
| 5′D | | | | |
| Mutational | | | | |
| Analysis | | | | |
| AS83-DNA-5′M1 | [symbol] TC TTT GTT TTT CTT CTG | ssDNA | 25 | less active |
| | CCA ATT T | | | |
| AS83-DNA-5′M2 | [symbol] C TTT GTT TTT CTT CTG | ssDNA | 25 | less active |
| | CCA ATT T | | | |
| AS83-DNA-M3 | CTC TTT GTT TTT [symbol] TT CTG | ssDNA | 25 | less active |
| | CCA ATT T | | | |
| AS83-DNA-M4 | CTC TTT GTT TT [symbol] [symbol] T CTG | ssDNA | 25 | less active |
| | CCA ATT T | | | |
| AS83-DNA-M5 | CTC TTT [symbol] TTT CTT CTG | ssDNA | 25 | less active |
| | CCA ATT T | | | |
| AS83-DNA-M6 | CTC TTT GTT TTT CTT C [symbol] | ssDNA | 25 | less active |
| | gCA ATT T | | | |
| AS83-DNA-3′M1 | CTC TTT GTT TTT CTT CTG | ssDNA | 25 | less active |
| | CCA ATT [symbol] | | | |
| AS83-DNA-3′M2 | CTC TTT GTT TTT CTT CTG | ssDNA | 25 | inactive |
| | CCA AT [symbol] [symbol] | | | |
| AS83-DNA-3′ddC | CTC TTT GTT TTT CTT CTG | ssDNA | 26 | inactive |
| | CCA ATT T-3′ddC | | | |
| AS83-DNA- | CTC TTT GTT TTT CTT CTG | ssDNA | 26 | inactive |
| 3′InvdT | CCA ATT T-3′InvdT | | | |

### Example 4

### Identification of Effective Trigger Polynucleotides

[0073] One non-limiting example of a method for selecting a polynucleotide for use in a composition for topical application to the surface of a parent plant involves the mapping of efficacious oligonucleotide or polynucleotide sequences (or segments of sequences) using a whole-gene (or full-length reference sequence) tiling array approach. The available full-length reference sequence is divided into “tiling sequences” or segments of 25 contiguous nucleotides along the entire length of the available sequence. For convenience, an Excel template was developed to allow convenient generation of sense and anti-sense tiling sequences for any given full-length reference sequence, providing as output a list of sense and anti-sense sequences for submission to oligonucleotide synthesis providers such as IDT (Integrated DNA Technologies, Coralville, Iowa). Oligonucleotides corresponding to each 25-mer tiling sequence (in sense, anti-sense, or both sense and anti-sense orientation) are synthesized for efficacy screening. Oligonucleotides are screened in sets. It is clear to one skilled in the art that the tiling sequences can be of sizes other than 25 nucleotides (such as about 18, 19, 20, 21, 22, 23, or 24 nucleotides, or larger than 25 nucleotides), that these tiling sequences can be designed to be contiguous segments with no overlap or to overlap adjacent segments, and that such tiling sequences can be grouped into sets of any size. For example, sets of five individual oligonucleotides are pooled into a single polynucleotide composition using 20 mM phosphate buffer and 2 percent w/v ammonium sulfate and 1 percent Silwet L-77, and topically applied to plants at a rate known to be efficacious for the plant species of interest (e.g., 4 nanomoles per plant). Those oligonucleotide sets showing better efficacy are then re-screened by testing the individual component oligonucleotides for efficacy.

[0074] A specific example of selecting a polynucleotide for use in a composition for topical application to the surface of a parent plant follows. An EPSPS promoter 1302 nucleotide sequence was identified from genomic sequence of Palmer amaranth (Amaranthus palmeri) as having the sequence SEQ ID NO: 3543. A 1152 nucleotide segment of the 1302 nucleotides EPSPS promoter sequence was used in this example.

[0075] The 1152-nt EPSPS promoter sequence was “tiled” (i.e., the full-length sequence covered by overlapping shorter sequences) by 25-mer anti-sense (AS) and sense (S) ssDNAs. A total of 96 25-mer ssDNA oligonucleotides were designed and grouped into 16 sets of 6 ssDNA oligonucleotides each (each set covering 150 contiguous nucleotides of the promoter sequence). The oligonucleotides were synthesized by IDT in 96-well plate format. Oligonucleotide sequences are provided in Table 3 (SEQ ID NO: 3588-3779). The oligonucleotides in a given set consisted of six contiguous sequences (in terms of their position within the 1152-nt full-length sequence) where each oligonucleotide did not overlap the adjacent oligonucleotide(s).

TABLE 3
Polynucleotides for targeting Amaranthus palmeri EPSPS promoter

| | | SEQ | | | |
|---|---|---|---|---|---|
| | | ID | | | SEQ ID |
| Name | Antisense Sequence | NO: | Name | Sense Sequence | NO: |
| AS1 | cgaatcaaaggaaaaagttatccaa | 3588 | S_1 | ttggataactttttcctttgattcg | 3684 |
| AS2 | aataatccgattcgaatcaaaggaa | 3589 | S_3 | gaatcggattatttttaatacagta | 3686 |
| AS3 | tactgtattaaaaataatccgattc | 3590 | S_5 | attatgaactgatttaatgaaagtg | 3688 |
| AS4 | atcagttcataatactgtattaaaa | 3591 | S_7 | ggaggaagtttcaatttttaaagtt | 3690 |
| AS5 | cactttcattaaatcagttcataat | 3592 | S_9 | tgtaggtgtaatgttttctcatttt | 3692 |
| AS6 | tgaaacttcctccactttcattaaa | 3593 | S_11 | tggatatgaaagtggaggaagtttc | 3694 |
| AS7 | aactttaaaaattgaaacttcctcc | 3594 | S_2 | ttcctttgattcgaatcggattatt | 3685 |
| AS8 | cattacacctacaactttaaaaatt | 3595 | S_4 | ttttaatacagtattatgaactgat | 3687 |
| AS9 | aaaatgagaaaacattacacctaca | 3596 | S_6 | tttaatgaaagtggaggaagtttca | 3689 |
| AS10 | actttcatatccaaaatgagaaaac | 3597 | S_8 | aatttttaaagttgtaggtgtaatg | 3691 |
| AS11 | gaaacttcctccactttcatatcca | 3598 | S_10 | gttttctcattttggatatgaaagt | 3693 |
| AS12 | tgattcgaaattgaaacttcctcca | 3599 | S_12 | tggaggaagtttcaatttcgaatca | 3695 |
| AS13 | aactggcaaacatgattcgaaattg | 3600 | S_13 | caatttcgaatcatgtttgccagtt | 3696 |
| AS14 | attcattgaatcaactggcaaacat | 3601 | S_15 | tgattcaatgaatgctcttggaaat | 3698 |
| AS15 | atttccaagagcattcattgaatca | 3602 | S_17 | tgaccaagagttcaaggcttcttgt | 3700 |
| AS16 | gaactcttggtcatttccaagagca | 3603 | S_19 | ttataaaacatttcaattttgatct | 3702 |
| AS17 | acaagaagccttgaactcttggtca | 3604 | S_21 | taagaatgaactatttagaacttaa | 3704 |
| AS18 | aaatgttttataacaagaagccttg | 3605 | S_23 | aagtaattaaattattagttataac | 3706 |
| AS19 | agatcaaaattgaaatgttttataa | 3606 | S_14 | atgtttgccagttgattcaatgaat | 3697 |
| AS20 | tagttcattcttagatcaaaattga | 3607 | S_16 | tgctcttggaaatgaccaagagttc | 3699 |
| AS21 | ttaagttctaaatagttcattctta | 3608 | S_18 | caaggcttcttgttataaaacattt | 3701 |
| AS22 | aatttaattactttaagttctaaat | 3609 | S_20 | tcaattttgatctaagaatgaacta | 3703 |
| AS23 | gttataactaataatttaattactt | 3610 | S_22 | atttagaacttaaagtaattaaatt | 3705 |
| AS24 | atttttttataagttataactaata | 3611 | S_24 | tattagttataacttataaaaaaat | 3707 |
| AS25 | ggttaaaattgaatttttttataag | 3612 | S_25 | cttataaaaaaattcaattttaacc | 3708 |
| AS26 | ttataaatttaaggttaaaattgaa | 3613 | S_27 | cttaaatttataaattatgacctta | 3710 |
| AS27 | taaggtcataatttataaatttaag | 3614 | S_29 | aaaaagatcaagtattgaacgcata | 3712 |
| AS28 | acttgatctttttaaggtcataatt | 3615 | S_31 | atttagaaaaattataattcggctt | 3714 |
| AS29 | tatgcgttcaatacttgatcttttt | 3616 | S_33 | tatcagtctcatattgagacggtct | 3716 |
| AS30 | aatttttctaaatatgcgttcaata | 3617 | S_35 | Tcgtccaagacaagttgtatcattt | 3718 |
| AS31 | aagccgaattataatttttctaaat | 3618 | S_26 | ttcaattttaaccttaaatttataa | 3709 |
| AS32 | tatgagactgataagccgaattata | 3619 | S_28 | aattatgaccttaaaaagatcaagt | 3711 |
| AS33 | agaccgtctcaatatgagactgata | 3620 | S_30 | tattgaacgcatatttagaaaaatt | 3713 |
| AS34 | Ttgtcttggacgagaccgtctcaat | 3621 | S_32 | tataattcggcttatcagtctcata | 3715 |
| AS35 | aaatgatacaacttgtcttggacga | 3622 | S_34 | attgagacggtctcgtccaagacaA | 3717 |
| AS36 | atttgattatataaatgatacaact | 3623 | S_36 | Agttgtatcatttatataatcaaat | 3719 |
| AS37 | actcataattatatttgattatata | 3624 | S_37 | Tatataatcaaatataattatgagt | 3720 |
| AS38 | ctacatgaatacactcataattata | 3625 | S_39 | Tgtattcatgtaggtttcaacttta | 3722 |
| AS39 | taaagttgaaacctacatgaataca | 3626 | S_41 | Aaagcctaggtgaaagatatgttgt | 3724 |
| AS40 | tcacctaggctttaaagttgaaacc | 3627 | S_43 | Tagcatctttgtgaaagtcagccta | 3726 |
| AS41 | acaacatatctttcacctaggcttt | 3628 | S_45 | Ataacttggttctaaaattttgaag | 3728 |
| AS42 | cacaaagatgctacaacatatcttt | 3629 | S_47 | Gcataaccatatagtccctcgaatt | 3730 |
| AS43 | taggctgactttcacaaagatgcta | 3630 | S_38 | Tataattatgagtgtattcatgtag | 3721 |
| AS44 | agaaccaagttataggctgactttc | 3631 | S_40 | Ggtttcaactttaaagcctaggtga | 3723 |
| AS45 | cttcaaaattttagaaccaagttat | 3632 | S_42 | Aaagatatgttgtagcatctttgtg | 3725 |
| AS46 | tatatggttatgcttcaaaatttta | 3633 | S_44 | Gaaagtcagcctataacttggttct | 3727 |
| AS47 | aattcgagggactatatggttatgc | 3634 | S_46 | Taaaattttgaagcataaccatata | 3729 |
| AS48 | acaacttgaatgaattcgagggact | 3635 | S_48 | Agtccctcgaattcattcaagttgt | 3731 |
| AS49 | aaagtaaattggacaacttgaatga | 3636 | S_49 | Tcattcaagttgtccaatttacttt | 3732 |
| AS50 | ggcaagtataaaaaagtaaattgga | 3637 | S_51 | Ttttatacttgccgagacaacattt | 3734 |
| AS51 | aaatgttgtctcggcaagtataaaa | 3638 | S_53 | Ttaaacccttaatatttctaattaa | 3736 |
| AS52 | attaagggtttaaaatgttgtctcg | 3639 | S_55 | Atcttaattaaaaattatgaaaatt | 3738 |
| AS53 | ttaattagaaatattaagggtttaa | 3640 | S_57 | Ttgatattaataatctttgtattga | 3740 |
| AS54 | ttttaattaagattaattagaaata | 3641 | S_59 | Aaacgaatttaacaagatctcacat | 3742 |
| AS55 | aattttcataatttttaattaagat | 3642 | S_50 | Tccaatttacttttttatacttgcc | 3733 |
| AS56 | ttattaatatcaaattttcataatt | 3643 | S_52 | Cgagacaacattttaaacccttaat | 3735 |
| AS57 | tcaatacaaagattattaatatcaa | 3644 | S_54 | Tatttctaattaatcttaattaaaa | 3737 |
| AS58 | gttaaattcgtttcaatacaaagat | 3645 | S_56 | Aattatgaaaatttgatattaataa | 3739 |
| AS59 | atgtgagatcttgttaaattcgttt | 3646 | S_58 | Atctttgtattgaaacgaatttaac | 3741 |
| AS60 | taaaacatagtcatgtgagatcttg | 3647 | S_60 | Caagatctcacatgactatgtttta | 3743 |
| AS61 | taatctataagttaaaacatagtca | 3648 | S_61 | Tgactatgttttaacttatagatta | 3744 |
| AS62 | ttgtattttttttaatctataagtt | 3649 | S_63 | Aaaaaaaatacaaattaagagtgat | 3746 |
| AS63 | atcactcttaatttgtatttttttt | 3650 | S_65 | Taagtgaatagtgccccaaaacaaa | 3748 |
| AS64 | cactattcacttatcactcttaatt | 3651 | S_67 | Atgggacaacttagatgaattggag | 3750 |
| AS65 | tttgttttggggcactattcactta | 3652 | S_69 | Ggtaatattaggtagcaagtgatct | 3752 |
| AS66 | taagttgtcccatttgttttggggc | 3653 | S_71 | Tagcaagtgatcactttaacatcaa | 3754 |
| AS67 | ctccaattcatctaagttgtcccat | 3654 | S_62 | Aacttatagattaaaaaaaatacaa | 3745 |
| AS68 | acctaatattacctccaattcatct | 3655 | S_64 | Aattaagagtgataagtgaatagtg | 3747 |
| AS69 | agatcacttgctacctaatattacc | 3656 | S_66 | Gccccaaaacaaatgggacaactta | 3749 |
| AS70 | tgatcacttgctagatcacttgcta | 3657 | S_68 | Agatgaattggaggtaatattaggt | 3751 |
| AS71 | ttgatgttaaagtgatcacttgcta | 3658 | S_70 | Tagcaagtgatctagcaagtgatca | 3753 |
| AS72 | aagtgatcaattttgatgttaaagt | 3659 | S_72 | Actttaacatcaaaattgatcactt | 3755 |
| AS73 | atttgaacctataagtgatcaattt | 3660 | S_73 | Aaattgatcacttataggttcaaat | 3756 |
| AS74 | gtaaaagtttcaatttgaacctata | 3661 | S_75 | Ttgaaacttttactttaattgatat | 3758 |
| AS75 | atatcaattaaagtaaaagtttcaa | 3662 | S_77 | Tgtttaaatactactttaaattgaa | 3760 |
| AS76 | tagtatttaaacatatcaattaaag | 3663 | S_79 | Aattgatatttttaaggtcaaaatt | 3762 |
| AS77 | ttcaatttaaagtagtatttaaaca | 3664 | S_81 | Tgaaacctttaagattataattgaa | 3764 |
| AS78 | aaaaatatcaatttcaatttaaagt | 3665 | S_83 | Aaattggcagaagaaaaacaaagag | 3766 |
| AS79 | aattttgaccttaaaaatatcaatt | 3666 | S_74 | Tataggttcaaattgaaacttttac | 3757 |
| AS80 | cttaaaggtttcaattttgacctta | 3667 | S_76 | Ctttaattgatatgtttaaatacta | 3759 |
| AS81 | ttcaattataatcttaaaggtttca | 3668 | S_78 | Actttaaattgaaattgatattttt | 3761 |
| AS82 | cttctgccaattttcaattataatc | 3669 | S_80 | Taaggtcaaaattgaaacctttaag | 3763 |
| AS83 | ctctttgtttttcttctgccaattt | 3670 | S_82 | Gattataattgaaaattggcagaag | 3765 |
| AS84 | cttatattctttctctttgtttttc | 3671 | S_84 | Gaaaaacaaagagaaagaatataag | 3767 |
| AS85 | caatttgcgtgtcttatattctttc | 3672 | S_85 | Gaaagaatataagacacgcaaattg | 3768 |
| AS86 | agtagatcggtacaatttgcgtgtc | 3673 | S_87 | Gtaccgatctactcttatttcaatt | 3770 |
| AS87 | aattgaaataagagtagatcggtac | 3674 | S_89 | Tttgagacggtctcgcccaagacta | 3772 |
| AS88 | agaccgtctcaaaattgaaataaga | 3675 | S_91 | Agatgttcggtcatcctacaccaac | 3774 |
| AS89 | tagtcttgggcgagaccgtctcaaa | 3676 | S_93 | Ccccaaaaaattcaacaacaaagtc | 3776 |
| AS90 | tgaccgaacatctagtcttgggcga | 3677 | S_95 | Cttataatgattccctctaatctac | 3778 |
| AS91 | gttggtgtaggatgaccgaacatct | 3678 | S_86 | Gacacgcaaattgtaccgatctact | 3769 |
| AS92 | gaattttttggggttggtgtaggat | 3679 | S_88 | Tcttatttcaattttgagacggtct | 3771 |
| AS93 | gactttgttgttgaattttttgggg | 3680 | S_90 | Tcgcccaagactagatgttcggtca | 3773 |
| AS94 | gaatcattataagactttgttgttg | 3681 | S_92 | Atcctacaccaaccccaaaaaattc | 3775 |
| AS95 | gtagattagagggaatcattataag | 3682 | S_94 | Caacaacaaagtcttataatgattc | 3777 |
| AS96 | gtgtagactgtagtagattagaggg | 3683 | S_96 | Ccctctaatctactacagtctacac | 3779 |

[0076] Oligonucleotide sets assigned an even number n contain oligonucleotides with a sequence shifted by 12 or 13 nucleotides (nt) relative to the 3′ end of the oligonucleotides in sets assigned a number equal to (n−1). For example, the oligonucleotide sequences in set number 2 have a sequence shifted by 12 or 13 nt relative to the 3′ end of the oligonucleotides in set number 1.

[0077] The ssDNA oligonucleotides were formulated as 100 micromolar (per oligonucleotide) mixtures (each consisting of a set of 6 oligonucleotides) in 20 millimolar phosphate buffer (pH 7.0), 2% ammonium sulfate, 1% Silwet® L-77, and were hand applied by pipetting to the surface of four fully expanded source leaves of glyphosate-resistant Palmer amaranth (Amaranthus palmeri R-22) plants. Each leaf received 10 microliters of 100 micromolar ssDNA solution (a total of 1 nanomole per oligonucleotide per leaf for a total 4 nanomole per oligonucleotide per plant). Silwet-containing buffer without oligonucleotides was applied as a negative control. A composition of four EPSPS short dsRNA1, 3, 4 and 5 (see Example 6) were applied at 4 nm each oligonucleotide per plant as positive control. The Palmer plants were then sprayed with 2× WeatherMax (1.5 lb/ac) at either 2 or 3-day after oligos treatment.

[0078] The first round of efficacy testing showed that sets 8 and 13 gave better herbicidal control of Palmer amaranth (for both sense and anti-sense strands). A second round of efficacy testing used the 12 individual oligonucleotides in sets 8 and 13 and showed that five individual ssDNA oligonucleotides numbered 44, 48, 79, 81, and 83 gave better herbicidal control of Palmer amaranth than the other seven ssDNA oligonucleotides. These five ssDNA oligonucleotides were individually tested at 16 nmol/plant followed by 2× WMax on Palmer R-22 plants. The treated Palmer amaranth plants were observed ten days after treatment and showed that ssDNA oligonucleotides numbers 79 (SEQ ID NO: 3666), 81(SEQ ID NO: 3668), and 83(SEQ ID NO: 3670) gave 95, 98 and 99 percent control respectively when applied in combination with dsRNA5 (EPSPS) and dsRNATIF1 (SEQ ID NO: 3780).

[0079] Further experimental testing of the AS83 trigger that targets the EPSPS promoter in Palmer R-22 was conducted in which the AS83 trigger was used to make ssDNA, dsRNA (SEQ ID NO:3789) and dsDNA. These AS83 molecules were tested as described in Example 3 and the results shown in Table 4 determined that all of the molecular forms of AS83 were active in making the Palmer R-22 plant sensitive to glyphosate.

TABLE 4
EPSPS promoter AS83 trigger molecules

| Oligo Name | Sequence (AS/bottom strand) | Type | Size | Activity |
|---|---|---|---|---|
| AS83-DNA-wt- | CTC TTT GTT TTT CTT CTG | ssDNA | 25 | active |
| | CCA ATT T | | | |
| AS83-RNA-wt- | CUC UUU GUU UUU CUU CUG | dsRNA | 25 | active |
| | CCA AUU U | | | |
| AS83-DNA-blunt | CTC TTT GTT TTT CTT CTG | dsDNA | 25 | active |
| | CCA ATT T | | | |

### Example 5

[0080] Tiling of tigger oligonucleotides was conducted on a Palmer amaranth EPSPS coding region using a similar testing protocol as described in Example 3. In this test, approximately 700 base pairs of coding region were used to select 46 individual antisense ssDNA oligonucleotides each 25 nucleotides long. These were applied to Palmer amaranth plants (R-22) at 12 nmole per oligonucleotide per plant, followed by 2× WeatherMax 2 days after oligonucleotide treatment later. The plants were scored for glyphosate effect on growth. As shown in FIG. 1, there were two regions identified in the coding sequence where many of the trigger molecules were able to provide a glyphosate sensitive phenotype to the treated plants, these are identified by the boxes in FIG. 1. The 5′ region (Region 1, SEQ ID NO:3787) is approximately 150 nucleotides including and between antisense oligo 34 (SEQ ID NO: 3781) and 57 (SEQ ID NO: 3782) and the 3′ region (Region 2, SEQ ID NO:3788) is approximately 100 nucleotides including and between antisense oligo 32 (SEQ ID NO:3783) and oligo 36 (SEQ ID NO:3784). The triggers plus glyphosate provided 30-70 percent and 25-45 percent control in the 5′ region and in the 3′ region, respectively. Additional trigger polynucleotides in these regions include oligo 81 (SEQ ID NO: 3785) and oligo 95 (SEQ ID NO: 3786). It is contemplated that additional trigger molecules can be identified in these regions and combinations of triggers would be useful to provide a high level of glyphosate sensitivity.

### Example 6

### Effects on Transgenic Herbicide Tolerant Plants

[0081] This example demonstrates that the topical application of a polynucleotide trigger molecule can be used to make transgenic herbicide tolerant crops sensitive to the herbicide for which they were engineered to be tolerant. In this example, a gene coding sequence for Agrobacterium tumefaciens CP4 EPSPS (SEQ ID NO: 1) was targeted with two dsRNA trigger molecules referred to as CP4-12 (82-462 of SEQ ID NO:1) a 381 polynucleotide, and CP4-34 (594-1043 of SEQ ID NO:1) a 450 polynucleotide. Corn and cotton plants that were transformed with the CP4 EPSPS gene and are resistant to glyphosate were planted in pots in a greenhouse along with negative isolines for each and grown to the first true leaf emergence stage then treated with a trigger solution containing 0.5% Silwet L77, 2% ammonium sulfate, 20 mM Na Phoshpate (pH 6.8) at different rates of trigger amount, 0 picomoles (pmol), 210 pmol, 630 pmol and 1890 pmol. For each replication (8-10 plants), two fully expanded cotyledons were treated by pipette with 50 microliters of trigger solution each, then sprayed two-three days later with 1.5 a.e.lb/acre) of RoundUp™ Ultra (glyphosate, Monsanto, St Louis, Mo.). The cotton and corn plants were scored for stunting and injury 7-16 days after spray treatment. FIGS. 2 and 3 show the corn and cotton plant results, respectively. The corn plants in FIG. 2 shows the number of treated plants that showed glyphosate injury after treatment with the trigger polynucleotides and glyphosate, injury was observed as dead or damaged terminal leaves 2-4 days after RoundUp treatment, and stunting was evident 7-14 days after RoundUp treatment. The nontransgenic control is labeled “Minus CP4”, these plant were killed by the RoundUp treatment. FIG. 3 shows the results of glyphosate tolerant cotton plants treated with the trigger polynucleotides and glyphosate, symptoms observed on the cotton plants were severe stunting and death of the apical meristem. These results demonstrate that topical treatment with a trigger polynucleotide can be used to effect a herbicide tolerant trait in a transgenic herbicide tolerant crop plant.

### Example 7

### Enhancement with the Addition of Non-EPSPS Herbicides

[0082] This example demonstrates that the addition of herbicides with a mode of action different than glyphosate that enhance the effect of the treatment comprising glyphosate, an EPSPS trigger polynucleotides, and an essential gene (transcription initiation factor, TIF) trigger polynucleotide. Glyphosate is applied as a Roundup WeatherMAX® formulation (RU Wmax, Monsanto, St Louis, Mo.) at 2× (1.5 pounds acid equivalent/acre), 4× and 8× in a field test plot infested with glyphosate resistant A. palmeri. Clarity® (Diglycolamine salt, BASF) is a dicamba formulation applied at 0.25 pounds/acre (lb/ac) is equal to half of the recommended use rate for broadleaf weed control. The polynucleotides are all dsRNA, 4001 is mixture of the following four A. palmeri EPSPS dsRNA trigger polynucleotides: dsRNA1: sense strand sequence CUACCAUCAACAAUGGUGUCC (1479-1499 of SEQ ID NO: 10) and complementary anti-sense strand, and dsRNA3: sense strand GUCGACAACUUGCUGUAUAGU (4241-4261 of SEQ ID NO: 10) and complementary anti-sense strand, and dsRNA4: sense strand GGUCACCUGGACAGAGAAUAG(9919-9939 of SEQ ID NO: 10) and complementary anti-sense strand, and dsRNA5: sense strand AAUGCCAGAUGUUGCUAUGAC (10015-10035 of SEQ ID NO: 10) and complementary anti-sense strand and one A. palmeri TIF dsRNA trigger polynucleotide (dsRNATIF1: sense strand GCACAAAUGUAAAUAAACCGUCUCC (SEQ ID NO: 3780) and complementary anti-sense strand), 4002 is mixture of one EPSPS dsRNA trigger polynucleotide (dsRNA5) and one A. palmeri TIF dsRNA trigger polynucleotide (dsRNATIF1). The composition of the herbicides and polynucleotides also contain one percent Silwet L77.

[0083] The treatments of the field plots containing glyphosate resistant A. palmeri plants (mostly 4-6 inches tall) with compositions shown in Table 6 with 4 replications per treatment at a spray volume of 10 gallons per acre, the total polynucleotide concentration was in the composition was approximately 160 nmol. The treated glyphosate resistant A. palmeri were scored for percent injury between 10-14 days post treatment. The results show that glyphosate (RU Wmax) was not effective in controlling this population of resistant A. palmeri even at 8× the recommended field rates, 52.5 percent. The addition of the 4001 and 4002 polynucleotides substantially increased the observed glyphosate percent injury, 83.75 and 72.5 percent respectively. The treatments that also included 0.25 lb/ac Clarity (dicamba) increased the injury rate to 95.75 percent when included in the composition with the 4001 trigger polynucleotides and to 93.25 percent when included in the composition with the 4002 trigger polynucleotides. The RU Wmax and Clarity alone showed a 83.75 percent injury rate on the glyphosate resistant A. palmeri.

TABLE 5
Addition of Dicamba to glyphosate and EPSPS and essential
gene trigger polynucleotides enhances injury rates to
glyphosate resistant A. palmeri.

| | Percent injury | |
|---|---|---|
| Treatment | Mean | std err |
| RU Wmax 2X | 28.75 | 12.045 |
| RU Wmax 4X | 30 | 4.291 |
| RU Wmax 8X | 52.5 | 11.219 |
| 2X RU Wmax + 4001 | 83.75 | 3.1 |
| 2X RU Wmax + 4001 + 0.25 lb | 95.75 | 4.095 |
| Clarity | | |
| 2X RU Wmax + 4002 | 72.5 | 3.067 |
| 2X RU Wmax + 4002 + 0.25 lb | 93.25 | 3.513 |
| Clarity | | |
| 2X RU Wmax + 0.25 lb Clarity | 83.75 | 6.221 |

[0084] A greenhouse test was conducted to determine the effect of a composition containing 2,4-D herbicide, an EPSPS dsRNA, an essential gene dsRNA and a glyphosate herbicide. The polynucleotides used in the test was 4002 which is a mixture of 1 EPSPS dsRNA trigger polynucleotide (dsRNA5) and 1 A. palmeri TIF dsRNA trigger polynucleotide (dsRNATIF1), at a concentration of 80 nm applied with a 9501E nozzle at 93 L/ha (liters/hectare). Roundup WeatherMax® was the glyphosate herbicide and applied at the 2× rate. The 2,4-D herbicide is 2,4D amine (dimethylamine salt) at a concentration of 3.8 lb/gal and tested at 2 rates, 0.0625 pounds/acre (lb/ac) and 0.125 lb/ac. The composition of the herbicides and polynucleotides also contain one percent Silwet L77.

[0085] A. palmeri (R-22) were treated with the compositions listed in Table 6 when they were between 4-8 centimeters tall and had 6-12 leaves, there were 6 replications in the experiment. The effect of the composition was measured as percent control relative to an untreated control 14 days after treatment. Table 6 shows that the composition containing the polynucleotides and glyphosate had enhanced herbicidal activity when 2,4-D was included in the composition as demonstrated by the reduced rate needed to provide the same level of percent control as twice the amount.

TABLE 6
Addition of 2,4-D to glyphosate and trigger polynucleotides

| | % Control |
|---|---|
| Treatment Description | (mean) |
| Roundup WeatherMAX (1.5/A) | 51.7 |
| 2,4-D (0.0625 lb/A) | 60 |
| 2,4-D (0.125 lb/A) | 80.8 |
| RU Wmax (1.5 lb/A) + 2,4-D (0.0625 lb/A) | 57.5 |
| RU Wmax (1.5 lb/A) + 2,4-D (0.125 lb/A) | 77.5 |
| 4002 + RU Wmax (1.5 lb/A) + 2,4-D (0.0625 lb/A) | 80.8 |
| 4002 + RU Wmax (1.5 lb/A) + 2,4-D (0.125 lb/A) | 88.3 |

### Example 8

### A Method to Control Weeds in a Field

[0086] A method to control weeds in a field comprises the use of trigger polynucleotides that can modulate the expression of an EPSPS gene in one or more target weed plant species. Example 5 showed that a weed control composition comprising multiple herbicides and multiple polynucleotides can be used in a field environment to control A. palmeri plant growth. An analysis of EPSPS gene sequences from 20 plant species provided a collection of 21-mer polynucleotides (SEQ ID NO:3223-3542) that can be used in compositions to affect the growth or develop or sensitivity to glyphosate herbicide to control multiple weed species in a field. A composition containing 1 or 2 or 3 or 4 or more of the polynucleotides of SEQ ID NO:3223-3542 would enable broad activity of the composition against the multiple weed species or variant populations that occur in a field environment.

[0087] The method includes creating an agricultural chemical composition that comprises components that include at least one polynucleotide of SEQ ID NO:3223-3542 or any other effective gene expression modulating polynucleotide essentially identical or essentially complementary to SEQ ID NO:1-120 or fragment thereof, a transfer agent that mobilizes the polynucleotide into a plant cell and a glyphosate containing herbicide and optionally a polynucleotide that modulates the expression of an essential gene and optionally a herbicide that has a different mode of action relative to glyphosate. The polynucleotide of the composition includes a dsRNA, ssDNA or dsDNA or a combination thereof. A composition containing a polynucleotide can have a use rate of about 1 to 30 grams or more per acre depending on the size of the polynucleotide and the number of polynucleotides in the composition. The composition may include one or more additional herbicides as needed to provide effective multi-species weed control. For example, a composition comprising an EPSPS gene trigger oligonucleotide, the composition further including a co-herbicide but not limited to acetochlor, acifluorfen, acifluorfen-sodium, aclonifen, acrolein, alachlor, alloxydim, allyl alcohol, ametryn, amicarbazone, amidosulfuron, aminopyralid, amitrole, ammonium sulfamate, anilofos, asulam, atraton, atrazine, azimsulfuron, BCPC, beflubutamid, benazolin, benfluralin, benfuresate, bensulfuron, bensulfuron-methyl, bensulide, bentazone, benzfendizone, benzobicyclon, benzofenap, bifenox, bilanafos, bispyribac, bispyribac-sodium, borax, bromacil, bromobutide, bromoxynil, butachlor, butafenacil, butamifos, butralin, butroxydim, butylate, cacodylic acid, calcium chlorate, cafenstrole, carbetamide, carfentrazone, carfentrazone-ethyl, CDEA, CEPC, chlorflurenol, chlorflurenol-methyl, chloridazon, chlorimuron, chlorimuron-ethyl, chloroacetic acid, chlorotoluron, chlorpropham, chlorsulfuron, chlorthal, chlorthal-dimethyl, cinidon-ethyl, cinmethylin, cinosulfuron, cisanilide, clethodim, clodinafop, clodinafop-propargyl, clomazone, clomeprop, clopyralid, cloransulam, cloransulam-methyl, CMA, 4-CPB, CPMF, 4-CPP, CPPC, cresol, cumyluron, cyanamide, cyanazine, cycloate, cyclosulfamuron, cycloxydim, cyhalofop, cyhalofop-butyl, 2,4-D, 3,4-DA, daimuron, dalapon, dazomet, 2,4-DB, 3,4-DB, 2,4-DEB, desmedipham, dicamba, dichlobenil, ortho-dichlorobenzene, para-dichlorobenzene, dichlorprop, dichlorprop-P, diclofop, diclofop-methyl, diclosulam, difenzoquat, difenzoquat metilsulfate, diflufenican, diflufenzopyr, dimefuron, dimepiperate, dimethachlor, dimethametryn, dimethenamid, dimethenamid-P, dimethipin, dimethylarsinic acid, dinitramine, dinoterb, diphenamid, diquat, diquat dibromide, dithiopyr, diuron, DNOC, 3,4-DP, DSMA, EBEP, endothal, EPTC, esprocarb, ethalfluralin, ethametsulfuron, ethametsulfuron-methyl, ethofumesate, ethoxyfen, ethoxysulfuron, etobenzanid, fenoxaprop-P, fenoxaprop-P-ethyl, fentrazamide, ferrous sulfate, flamprop-M, flazasulfuron, florasulam, fluazifop, fluazifop-butyl, fluazifop-P, fluazifop-P-butyl, flucarbazone, flucarbazone-sodium, flucetosulfuron, fluchloralin, flufenacet, flufenpyr, flufenpyr-ethyl, flumetsulam, flumiclorac, flumiclorac-pentyl, flumioxazin, fluometuron, fluoroglycofen, fluoroglycofen-ethyl, flupropanate, flupyrsulfuron, flupyrsulfuron-methyl-sodium, flurenol, fluridone, fluorochloridone, fluoroxypyr, flurtamone, fluthiacet, fluthiacet-methyl, fomesafen, foramsulfuron, fosamine, glufosinate, glufosinate-ammonium, halosulfuron, halosulfuron-methyl, haloxyfop, haloxyfop-P, HC-252, hexazinone, imazamethabenz, imazamethabenz-methyl, imazamox, imazapic, imazapyr, imazaquin, imazethapyr, imazosulfuron, indanofan, iodomethane, iodosulfuron, iodosulfuron-methyl-sodium, ioxynil, isoproturon, isouron, isoxaben, isoxachlortole, isoxaflutole, karbutilate, lactofen, lenacil, linuron, MAA, MAMA, MCPA, MCPA-thioethyl, MCPB, mecoprop, mecoprop-P, mefenacet, mefluidide, mesosulfuron, mesosulfuron-methyl, mesotrione, metam, metamifop, metamitron, metazachlor, methabenzthiazuron, methylarsonic acid, methyldymron, methyl isothiocyanate, metobenzuron, metolachlor, S-metolachlor, metosulam, metoxuron, metribuzin, metsulfuron, metsulfuron-methyl, MK-66, molinate, monolinuron, MSMA, naproanilide, napropamide, naptalam, neburon, nicosulfuron, nonanoic acid, norflurazon, oleic acid (fatty acids), orbencarb, orthosulfamuron, oryzalin, oxadiargyl, oxadiazon, oxasulfuron, oxaziclomefone, oxyfluorfen, paraquat, paraquat dichloride, pebulate, pendimethalin, penoxsulam, pentachlorophenol, pentanochlor, pentoxazone, pethoxamid, petrolium oils, phenmedipham, phenmedipham-ethyl, picloram, picolinafen, pinoxaden, piperophos, potassium arsenite, potassium azide, pretilachlor, primisulfuron, primisulfuron-methyl, prodiamine, profluazol, profoxydim, prometon, prometryn, propachlor, propanil, propaquizafop, propazine, propham, propisochlor, propoxycarbazone, propoxycarbazone-sodium, propyzamide, prosulfocarb, prosulfuron, pyraclonil, pyraflufen, pyraflufen-ethyl, pyrazolynate, pyrazosulfuron, pyrazosulfuron-ethyl, pyrazoxyfen, pyribenzoxim, pyributicarb, pyridafol, pyridate, pyriftalid, pyriminobac, pyriminobac-methyl, pyrimisulfan, pyrithiobac, pyrithiobac-sodium, quinclorac, quinmerac, quinoclamine, quizalofop, quizalofop-P, rimsulfuron, sethoxydim, siduron, simazine, simetryn, SMA, sodium arsenite, sodium azide, sodium chlorate, sulcotrione, sulfentrazone, sulfometuron, sulfometuron-methyl, sulfosate, sulfosulfuron, sulfuric acid, tar oils, 2,3,6-TBA, TCA, TCA-sodium, tebuthiuron, tepraloxydim, terbacil, terbumeton, terbuthylazine, terbutryn, thenylchlor, thiazopyr, thifensulfuron, thifensulfuron-methyl, thiobencarb, tiocarbazil, topramezone, tralkoxydim, tri-allate, triasulfuron, triaziflam, tribenuron, tribenuron-methyl, tricamba, triclopyr, trietazine, trifloxysulfuron, trifloxysulfuron-sodium, trifluralin, triflusulfuron, triflusulfuron-methyl, trihydroxytriazine, tritosulfuron, [3-[2-chloro-4-fluoro-5-(-methyl-6-trifluoromethyl-2,4-dioxo-,2,3,4-t-etrahydropyrimidin-3-yl)phenoxy]-2-pyridyloxy]acetic acid ethyl ester (CAS RN 353292-3-6), 4-[(4,5-dihydro-3-methoxy-4-methyl-5-oxo)-H-,2,4-triazol-1-ylcarbonyl-sulfamoyl]-5-methylthiophene-3-carboxylic acid (BAY636), BAY747 (CAS RN 33504-84-2), topramezone (CAS RN 2063-68-8), 4-hydroxy-3-[[2-[(2-methoxyethoxy)methyl]-6-(trifluoro-methyl)-3-pyridi-nyl]carbonyl]-bicyclo[3.2.]oct-3-en-2-one (CAS RN 35200-68-5), and 4-hydroxy-3-[[2-(3-methoxypropyl)-6-(difluoromethyl)-3-pyridinyl]carbon-yl]-bicyclo[3.2.]oct-3-en-2-one.

[0088] A field of crop plants in need of weed plant control is treated by spray application of the composition. The composition can be provided as a tank mix, a sequential treatment of components (generally the polynucleotide followed by the herbicide), a simultaneous treatment or mixing of one or more of the components of the composition from separate containers. Treatment of the field can occur as often as needed to provide weed control and the components of the composition can be adjusted to target specific weed species or weed families.

### Example 9

### Herbicidal Compositions Comprising Pesticidal Agents

[0089] A method of controlling weeds and plant pest and pathogens in a field of glyphosate tolerant crop plants is provided, wherein the method comprises applying a composition comprising an EPSPS trigger oligonucleotide, a glyphosate composition and an admixture of a pest control agent. For example, the admixture comprises insecticides, fungicides, nematocides, bactericides, acaricides, growth regulators, chemosterilants, semiochemicals, repellents, attractants, pheromones, feeding stimulants or other biologically active compounds or biological agents, such as, microorganisms.

[0090] For example, the admixture comprises a fungicide compound for use on a glyphosate tolerant crop plant to prevent or control plant disease caused by a plant fungal pathogen, The fungicide compound of the admixture may be a systemic or contact fungicide or mixtures of each. More particularly the fungicide compound includes, but is not limited to members of the chemical groups strobilurins, triazoles, chloronitriles, carboxamides and mixtures thereof. The composition may additional have an admixture comprises an insecticidal compound or agent.

[0091] The EPSPS trigger oligonucleotides and WeatherMAX® (WMAX) tank mixes with fungicides, insecticides or both are tested for use in soybean. Soybean rust is a significant problem disease in South America and serious concern in the U.S. Testing is conducted to develop a method for use of mixtures of the WMAX formulation and various commercially available fungicides for weed control and soy rust control. The field plots are planted with Roundup Ready® soybeans. All plots receive a post plant application of the EPSPS trigger+WMAX about 3 weeks after planting. The mixtures of trigger+WMAX or trigger+WMAX+fungicide+insecticides are used to treat the plots at the R1 stage of soybean development (first flowering) of treatment. Data is taken for percent weed control at 7 and 21 days after R1 treatment, soybean safety (percent necrosis, chlorosis, growth rate): 5 days after treatment, disease rating, and soybean yield (bushels/Acre). These mixtures and treatments are designed to provide simultaneous weed and pest control of soybean, such as fungal pest control, for example, soybean rust disease; and insect pest control, for example, aphids, armyworms, loopers, beetles, stinkbugs, and leaf hoppers.

[0092] Agricultural chemicals are provided in containers suitable for safe storage, transportation and distribution, stability of the chemical compositions, mixing with solvents and instructions for use. A container of a mixture of a trigger oligonucleotide+glyphosate+fungicide compound, or a mixture of a trigger oligonucleotide+glyphosate compound and an insecticide compound, or a trigger oligonucleotide+a glyphosate compound and a fungicide compound and an insecticide compound (for example, lambda-cyhalothrin, Warrier®). The container may further provide instructions on the effective use of the mixture. Containers of the present invention can be of any material that is suitable for the storage of the chemical mixture. Containers of the present invention can be of any material that is suitable for the shipment of the chemical mixture. The material can be of cardboard, plastic, metal, or a composite of these materials. The container can have a volume of 0.5 liter, 1 liter, 2 liter, 3-5 liter, 5-10 liter, 10-20 liter, 20-50 liter or more depending upon the need. A tank mix of a trigger oligonucleotide+glyphosate compound and a fungicide compound is provided, methods of application to the crop to achieve an effective dose of each compound are known to those skilled in the art and can be refined and further developed depending on the crop, weather conditions, and application equipment used.

[0093] Insecticides, fungicides, nematocides, bactericides, acaricides, growth regulators, chemosterilants, semiochemicals, repellents, attractants, pheromones, feeding stimulants or other biologically active compounds can be added to the trigger oligonucleotide to form a multi-component pesticide giving an even broader spectrum of agricultural protection. Examples of such agricultural protectants with which compounds of this invention can be formulated are: insecticides such as abamectin, acephate, azinphos-methyl, bifenthrin, buprofezin, carbofuran, chlorfenapyr, chlorpyrifos, chlorpyrifos-methyl, cyfluthrin, beta-cyfluthrin, cyhalothrin, lambda-cyhalothrin, deltamethrin, diafenthiuron, diazinon, diflubenzuron, dimethoate, esfenvalerate, fenoxycarb, fenpropathrin, fenvalerate, fipronil, flucythrinate, tau-fluvalinate, fonophos, imidacloprid, isofenphos, malathion, metaldehyde, methamidophos, methidathion, methomyl, methoprene, methoxychlor, methyl 7-chloro-2,5-dihydro-2-[[N-(methoxycarbonyl)-N-[4-(trifluoromethoxy)phenyl]amino]carbonyl]indeno[1,2-e][1,3,4]oxadiazine-4-a(3H)-carboxylate (DPX-JWO62), monocrotophos, oxamyl, parathion, parathion-methyl, permethrin, phorate, phosalone, phosmet, phosphamidon, pirimicarb, profenofos, rotenone, sulprofos, tebufenozide, tefluthrin, terbufos, tetrachlorvinphos, thiodicarb, tralomethrin, trichlorfon and triflumuron; most preferably a glyphosate compound is formulated with a fungicide compound or combinations of fungicides, such as azoxystrobin, benomyl, blasticidin-S, Bordeaux mixture (tribasic copper sulfate), bromuconazole, captafol, captan, carbendazim, chloroneb, chlorothalonil, copper oxychloride, copper salts, cymoxanil, cyproconazole, cyprodinil (CGA 219417), diclomezine, dicloran, difenoconazole, dimethomorph, diniconazole, diniconazole-M, dodine, edifenphos, epoxiconazole (BAS 480F), famoxadone, fenarimol, fenbuconazole, fenpiclonil, fenpropidin, fenpropimorph, fluazinam, fluquinconazole, flusilazole, flutolanil, flutriafol, folpet, fosetyl-aluminum, furalaxyl, hexaconazole, ipconazole, iprobenfos, iprodione, isoprothiolane, kasugamycin, kresoxim-methyl, mancozeb, maneb, mepronil, metalaxyl, metconazole, S-methyl 7-benzothiazolecarbothioate (CGA 245704), myclobutanil, neo-asozin (ferric methanearsonate), oxadixyl, penconazole, pencycuron, probenazole, prochloraz, propiconazole, pyrifenox, pyroquilon, quinoxyfen, spiroxamine (KWG4168), sulfur, tebuconazole, tetraconazole, thiabendazole, thiophanate-methyl, thiram, triadimefon, triadimenol, tricyclazole, trifloxystrobin, triticonazole, validamycin and vinclozolin; combinations of fungicides are common for example, cyproconazole and azoxystrobin, difenoconazole, and metalaxyl-M, fludioxonil and metalaxyl-M, mancozeb and metalaxyl-M, copper hydroxide and metalaxyl-M, cyprodinil and fludioxonil, cyproconazole and propiconazole; commercially available fungicide formulations for control of Asian soybean rust disease include, but are not limited to Quadris® (Syngenta Corp), Bravo® (Syngenta Corp), Echo 720® (Sipcam Agro Inc), Headline® 2.09EC (BASF Corp), Tilt® 3.6EC (Syngenta Corp), PropiMax™ 3.6EC (Dow AgroSciences), Bumper® 41.8EC (MakhteshimAgan), Folicur® 3.6F (Bayer CropScience), Laredo® 25EC (Dow AgroSciences), Laredo™ 25EW (Dow AgroSciences), Stratego® 2.08F (Bayer Corp), Domark™ 125SL (Sipcam Agro USA), and Pristine®38% WDG (BASF Corp) these can be combined with glyphosate compositions as described in the present invention to provide enhanced protection from soybean rust disease; nematocides such as aldoxycarb and fenamiphos; bactericides such as streptomycin; acaricides such as amitraz, chinomethionat, chlorobenzilate, cyhexatin, dicofol, dienochlor, etoxazole, fenazaquin, fenbutatin oxide, fenpropathrin, fenpyroximate, hexythiazox, propargite, pyridaben and tebufenpyrad; and biological agents such as Bacillus thuringiensis, Bacillus thuringiensis delta endotoxin, baculovirus, and entomopathogenic bacteria, virus and fungi.

TABLE 1
EPSPS gene polynucleotide sequences

| SEQ | | | | |
|---|---|---|---|---|
| ID NO | SPECIES | TYPE | LENGTH | SEQ |
| 1 | Agrobacterium | cDNA | 1362 | CACGGTGCAAGCAGCCGGCCCGCAACCGCCCGCAAATCC |
| | tumefaciens | | | TCTGGCCTTTCCGGAACCGTCCGCATTCCCGGCGACAAG |
| | | | | TCGATCTCCCACCGGTCCTTCATGTTCGGCGGTCTCGCG |
| | | | | AGCGGTGAAACGCGCATCACCGGCCTTCTGGAAGGCGAG |
| | | | | GACGTCATCAATACGGGCAAGGCCATGCAGGCCATGGGC |
| | | | | GCCAGGATCCGTAAGGAAGGCGACACCTGGATCATCGAT |
| | | | | GGCGTCGGCAATGGCGGCCTCCTGGCGCCTGAGGCGCCG |
| | | | | CTCGATTTCGGCAATGCCGCCACGGGCTGCCGCCTGACC |
| | | | | ATGGGCCTCGTCGGGGTCTACGATTTCGACAGCACCTTC |
| | | | | ATCGGCGACGCCTCGCTCACAAAGCGCCCGATGGGCCGC |
| | | | | GTGTTGAACCCGCTGCGCGAAATGGGCGTGCAGGTGAAA |
| | | | | TCGGAAGACGGTGACCGTCTTCCCGTTACCTTGCGCGGG |
| | | | | CCGAAGACGCCGACGCCGATCACCTACCGCGTGCCGATG |
| | | | | GCCTCCGCACAGGTGAAGTCCGCCGTGCTGCTCGCCGGC |
| | | | | CTCAACACGCCCGGCATCACGACGGTCATCGAGCCGATC |
| | | | | ATGACGCGCGATCATACGGAAAAGATGCTGCAGGGCTTT |
| | | | | GGCGCCAACCTTACCGTCGAGACGGATGCGGACGGCGTG |
| | | | | CGCACCATCCGCCTGGAAGGCCGCGGCAAGCTCACCGGC |
| | | | | CAAGTCATCGACGTGCCGGGCGACCCGTCCTCGACGGCC |
| | | | | TTCCCGCTGGTTGCGGCCCTGCTTGTTCCGGGCTCCGAC |
| | | | | GTCACCATCCTCAACGTGCTGATGAACCCCACCCGCACC |
| | | | | GGCCTCATCCTGACGCTGCAGGAAATGGGCGCCGACATC |
| | | | | GAAGTCATCAACCCGCGCCTTGCCGGCGGCGAAGACGTG |
| | | | | GCGGACCTGCGCGTTCGCTCCTCCACGCTGAAGGGCGTC |
| | | | | ACGGTGCCGGAAGACCGCGCGCCTTCGATGATCGACGAA |
| | | | | TATCCGATTCTCGCTGTCGCCGCCGCCTTCGCGGAAGGG |
| | | | | GCGACCGTGATGAACGGTCTGGAAGAACTCCGCGTCAAG |
| | | | | GAAAGCGACCGCCTCTCGGCCGTCGCCAATGGCCTCAAG |
| | | | | CTCAATGGCGTGGATTGCGATGAGGGCGAGACGTCGCTC |
| | | | | GTCGTGCGTGGCCGCCCTGACGGCAAGGGGCTCGGCAAC |
| | | | | GCCTCGGGCGCCGCCGTCGCCACCCATCTCGATCACCGC |
| | | | | ATCGCCATGAGCTTCCTCGTCATGGGCCTCGTGTCGGAA |
| | | | | AACCCTGTCACGGTGGACGATGCCACGATGATCGCCACG |
| | | | | AGCTTCCCGGAGTTCATGGACCTGATGGCCGGGCTGGGC |
| | | | | GCGAAGATCGAACTCTCCGATACGAAGGCTGCCTGA |
| 2 | Abutilon | cDNA | 1622 | TTCAGTTTCATTCAGATCAAATCTCAAAGGAGGTTTTTC |
| | theophrasti | | | CAATTCCCGGGGTTTGTGTTTGAACAGCAATGGTAAGTT |
| | | | | GGGAACAATCAAGGTTCGGCCAGGAGTGGTTTCTGCTTC |
| | | | | AACAGCAGCCACGGCTGAGAAGCCATCCAGCGCATCCGA |
| | | | | AATTGTGCTTCAACCAATCAATGAAATTTCGGGTACTGT |
| | | | | TAAATTACCCGGCTCTAAATCACTCTCCAATCGGATTCT |
| | | | | GCTCCTAGCTGCTCTATCCGAGGGAACTACTGTGGTTGA |
| | | | | CAATTTGTTGAATAGCGACGATGTTCATCACATGCTTGT |
| | | | | CGCTTTGGGAAAACTTGGCCTTCGTGTGGAGCATGACAG |
| | | | | TGAAAAGAAACGAGCCATTGTTGAAGGCTGCGGTGGTCA |
| | | | | ATTTCCAGTAGGGAAAGGGGAAGGTCAAGAAATTGAGCT |
| | | | | TTTCCTCGGGAATGCTGGAACCGCAATGCGACCTCTTAC |
| | | | | TGCTGCTATTACCGCCGCCGGTGGCAATTCAAGCTACGT |
| | | | | ACTTGATGGTGTACCCCGAATGAGAGAGAGGCCAATTGG |
| | | | | GGACTTAGTTACTGGTCTTAAGCAGCTGGGTGCAGATGT |
| | | | | CGATTGTACTCTTGGCACAAATTGCCCCCCTGTCCGTAT |
| | | | | AAATGGAAAGGGTGGTCTTCCTGGAGGAAAGGTGAAACT |
| | | | | TTCAGGATCTATCAGTAGTCAATACTTGACCGCTTTACT |
| | | | | CATGGCAGCTCCTTTGGCTCTTGGGGATGTGGAAATTGA |
| | | | | GATTATTGATAAACTGATTTCAATCCCATATGTTGAAAT |
| | | | | GACCATAAAATTGATGGAAAGGTTTGGGGTCAGTGTGGA |
| | | | | GCACAGTAATAGCTGGGATCGATTCTTTATCCGAGGAGG |
| | | | | TCAAAAGTACAAGTCTCCTGGAAATGCTTACGTCGAAGG |
| | | | | TGACGCTTCAAGTGCTAGTTACTTCCTTGCTGGTGCAGC |
| | | | | TGTTACTGGTGGGACTGTCACAGTAGAAGGATGTGGAAC |
| | | | | AAGTAGTTTGCAGGGTGATGTAAAATTCGCTGAGGTTCT |
| | | | | TGAGATGATGGGTGCCAAAGTTACTTGGACCGAGAACAG |
| | | | | TGTAACCGTCACTGGACCCCCAAGAAATTCCTTTGGGAG |
| | | | | GAAGCAATTGCGTGCTATTGATGTCAACATGAACAAAAT |
| | | | | GCCAGATGTTGCCATGACTCTCGCTGTTGTTGCCCTTTA |
| | | | | CGCTGATGGTCCCACTGCCATAAGAGATGTGGCAAGTTG |
| | | | | GAGGGTGAAAGAGACTGAAAGGATGATTGCTATATGCAC |
| | | | | AGAACTCAGGAAGCTCGGAGCAACAGTTGAAGAAGGGCC |
| | | | | AGATTATTGCGTCATCACTCCACCGGAGAAATTAAACGT |
| | | | | GACAGCAATAGATACTTATGATGATCACCGAATGGCCAT |
| | | | | GGCATTCTCTCTTGCCGCCTGTGCAGAGGTTCCAGTTAC |
| | | | | CATCAATGATCCTGGTTGTACCCGGAAAACCTTCCCTGA |
| | | | | CTACTTTGAAGTTCTCGAGAGGGTTACAAAGCATTGAAT |
| | | | | GGCTCGTTTTACTTCGTTATACAAGAGAAAGAAACAAAG |
| | | | | CATGAGAGATAGGTTCGTACCACTGTTCTTAAAATCAAA |
| | | | | GGCTGAAATCAGTTGAACCTTGTCTTCAATGTTGTCTCC |
| | | | | TGATCTGATAATTTCTCATCGGC |
| 3 | Amaranthus | cDNA | 958 | GCGCCCATTGACAGCTGCGGTTGCCGTTGCTGGAGGAAA |
| | graecizans | | | TTCAAGTTATGTGCTTGATGGAGTACCAAGAATGAGGGA |
| | | | | GCGCCCCATTGGGGATCTGGTAGCAGGTCTAAAGCAACT |
| | | | | TGGTTCAGATGTTGACTGTTTTCTTGGCACAAATTGCCC |
| | | | | TCCTGTTCGGGTCAATGCTAAAGGAGGCCTTCCAGGGGG |
| | | | | CAAGGTCAAGCTCTCTGGATCAGTTAGTAGCCAATATTT |
| | | | | AACTGCACTTCTCATGGCTACTCCTTTGGGTGTTGGAGA |
| | | | | CGTGGAGATTGAGATAGTTGATAAATTGATTTCTGTACC |
| | | | | GTATGTTGAAATGACAATAAGGTTGATGGAACGCTTTGG |
| | | | | AGTATCTGTTGAACATAGTGATAGTTGGGACAGGTTCTA |
| | | | | CATCCGAGGTGGTCAGAAATACAAATCTCCCGGAAAGGC |
| | | | | ATATGTTGAGGGTGATGCTTCAAGTGCTAGCTACTTTCT |
| | | | | AGCAGGAGCCGCCGTCACTGGTGGGACTGTGACTGTAAA |
| | | | | GGGTTGTGGAACAAGCAGTTTACAGGGTGATGTAAAATT |
| | | | | TGCTGAAGTTCTTGAAAAGATGGGTTGCAAGGTCACCTG |
| | | | | GACAGAGAATAGCGTAACTGTTACCGGACCACCCAGGGA |
| | | | | TTCATCTGGAAGAAAACATCTGCGCGCTATCGACGTCAA |
| | | | | CATGAACAAAATGCCAGATGTTGCTATGACTCTTGCAGT |
| | | | | TGTTGCCTTGTATGCAGATGGGCCCACCGCCATCAGAGA |
| | | | | TGTGGCTAGCTGGAGAGTGAAGGAAACCGAACGGATGAT |
| | | | | TGCCATTTGCACAGAACTGAGAAAGCTTGGGGCAACAGT |
| | | | | TGAGGAAGGATCTGATTTCTGTGTGATCACTCCGCCTGA |
| | | | | AAAGCTAAATCCTACCGCCATCGAAACTTATGACGATCA |
| | | | | CCGAATGGCCATGGCATTCTCTCTTGCTGCCTGTGCAGA |
| | | | | TGTTCCCGTCACTATCCTTGAT |
| 4 | Amaranthus | cDNA | 490 | GAGCCAAGAAACAACGCGAAATTCAGAGATAAAGAGAAA |
| | graecizans | | | GAATAATGGCTCAAGCTACTACCATCAACAATGGTGTCC |
| | | | | AAACTGGTCAATTGCACCATACTTTACCCAAAACCCACT |
| | | | | TACCCAAATCTTCAAAAACTGTTAATTTTGGATCAAACT |
| | | | | TGAGATTTTCTCCAAAGTTCATGTCTTTAACCAATAAAA |
| | | | | GAGTTGGTGGGCAATCATCAATTGTTCCCAGGATTCAAG |
| | | | | CTACTGTTGCTGCTGCATCTGAGAAGCCTTCATCTGCCC |
| | | | | CAGAAATTGTGTTACAACCCATCAAAGAGATCTCCGGTA |
| | | | | CTGTTCAATTGCCTGGGTCAAAGTCTTTATCCAATCGAA |
| | | | | TCCTTCTTTTAGCTGCTTTGTCTGAGGGCACAACATTGG |
| | | | | TCGACAACTTGCTGTATAGTGATGATATTCGTTATATGC |
| | | | | TGGACGCTCTCAGAGCTCTTGGTTTAAAAGTGGAGGATG |
| | | | | ATAATACAGCCAAAAGGGCAGT |
| 5 | Amaranthus | cDNA | 1682 | CTAAGCCCTCGTCTTTCCCTTCTCTCTCTCTTAAAATCT |
| | hybridus | | | TAAAATCCACCCAACTTTTTCAGCCAACAAACAACGCCA |
| | | | | AATTCAGAGAAAGAATAATGGCTCAAGCTACTACCATCA |
| | | | | ACAATGGTGTCCAAACTGGTCAATTGCACCATATTTTAC |
| | | | | CCAAAACCCACTTACCCAAATCTTCAAAAACTCTTAATT |
| | | | | TTGGATCAAACTTGAGAATTTCTCCAAAGTTCATGTCTT |
| | | | | TGACCAATAAAAGAGTTGGTGGGCAATCATCAATTGTTC |
| | | | | CCAAGATTCAAGCTTCTGTTGCTGCTGCAGCTGAGAAGC |
| | | | | CTTCATCTGTCCCAGAAATTGTTTTACAACCCATCAAAG |
| | | | | AGATCTCTGGTACTGTTCAATTGCCTGGGTCAAAGTCTT |
| | | | | TATCCAATCGAATCCTTCTTTTAGCTGCTTTGTCTGAGG |
| | | | | GCACAACAGTGGTCGACAACTTGCTGTATAGTGATGATA |
| | | | | TTCTTTATATGTTGGATGCTCTCAGAACTCTTGGTTTAA |
| | | | | AAGTGGAGGATGATAATACAGCCAAAAGGGCAGTCGTGG |
| | | | | AGGGTTGTGGTGGTCTGTTTCCTGTTGGTAAAGATGGAA |
| | | | | AGGAAGAGATTCAACTTTTCCTTGGTAATGCAGGAACAG |
| | | | | CGATGCGCCCATTGACAGCTGCGGTTGCCGTTGCTGGAG |
| | | | | GAAATTCTAGTTATGTGCTTGATGGAGTGCCAAGAATGA |
| | | | | GGGAGCGCCCCATTGGGGATCTGGTAGCAGGTCTAAAGC |
| | | | | AACTTGGTTCAGATGTTGACTGTTTTCTTGGCACAAATT |
| | | | | GCCCTCCTGTTCGGGTTAATGCTAAAGGAGGCCTTCCAG |
| | | | | GGGGCAAGGTCAAGCTCTCTGGATCGGTTAGTAGCCAAT |
| | | | | ATTTAACTGCACTTCTCATGGCTACTCCTTTGGGTCTTG |
| | | | | GAGACGTGGAGATTGAGATAGTTGATAAATTGATTTCTG |
| | | | | TACCGTATGTTGAAATGACAATAAGGTTGATGGAACGCT |
| | | | | TTGGAGTATCTGTAGAACATAGTGATAGTTGGGACAGGT |
| | | | | TCTACATACGAGGTGGTCAAAAATACAAATCTCCTGGAA |
| | | | | AGGCATATGTTGAGGGTGACGCTTCAAGTGCTAGCTACT |
| | | | | TCCTAGCTGGAGCCGCCGTCACTGGTGGGACTGTGACTG |
| | | | | TCAAGGGTTGTGGAACAAGCAGTTTACAGGGTGATGTAA |
| | | | | AATTTGCCGAAGTTCTTGAGAAGATGGGCTGCAAGGTCA |
| | | | | CCTGGACAGAGAATAGCGTAACTGTTACGGGACCACCCA |
| | | | | GGGATTCATCTGGAAGGAAACATCTGCGCGCTGTCGACG |
| | | | | TCAACATGAACAAAATGCCAGATGTTGCTATGACTCTTG |
| | | | | CAGTAGTTGCCTTGTATGCTGATGGGCCCACTGCCATCA |
| | | | | GAGATGTGGCTAGCTGGAGAGTGAAGGAAACCGAACGGA |
| | | | | TGATTGCCATTTGCACAGAACTGAGAAAGCTTGGGGCAA |
| | | | | CAGTTGAGGAAGGATCTGATTACTGTGTGATCACTCCGC |
| | | | | CTGAAAAGCTAAATCCCACCGCCATCGAAACTTATGACG |
| | | | | ATCACCGAATGGCCATGGCATTCTCTCTTGCTGCCTGTG |
| | | | | CAGATGTTCCCGTCACTATCCTTGATCCGGGATGCACCC |
| | | | | GTAAAACCTTCCCGGACTACTTTGAAGTTTTAGAAAAGT |
| | | | | TCGCCAAGCATTGAGTAACATATGGGTTCTTTAAATTGT |
| | | | | ACGCC |
| 6 | Amaranthus | cDNA | 843 | GAGGGTTGTGGTGGTCTGTTTCCTGTTTGGTAAAGATGG |
| | lividus | | | AAAGGAAGAGATTCAACTTTTCCTTGGTAATGCAGGAAC |
| | | | | AGCGATGCGCCCATTGACAGCTGCGGTTGCCGTTGCTGG |
| | | | | AGGAAATTCTAGTTATGTGCTTGATGGAGTGCCAAGAAT |
| | | | | GAGGGAGCGCCCCATTGGGGATCTGGTAGCAGGTCTAAA |
| | | | | GCAACTTGGTTCAGATGTTGACTGTTTTCTTGGCACAAA |
| | | | | TTGCCCTCCTGTTCGGGTTAATGCTAAAGGAGGCCTTCC |
| | | | | AGGGGGCAAGGTCAAGCTCTCTGGATCGGTTAGTAGCCA |
| | | | | ATATTTAACTGCACTTCTCATGGCTACTCCTTTGGGTCT |
| | | | | TGGAGACGTGGAGATTGAGATAGTTGATAAATTGATTTC |
| | | | | TGTACCGTATGTTGAAATGACAATAAGGTTGATGGAACG |
| | | | | CTTTGGAGTATCTGTAGAACATAGTGATAGTTGGGACAG |
| | | | | GTTCTACATACGAGGTGGTCAAAAATACAAATCTCCTGG |
| | | | | AAAGGCATATGTTGAGGGTGACGCTTCAAGTGCTAGCTA |
| | | | | CTTCCTAGCTGGAGCCGCCGTCACTGGTGGGACTGTGAC |
| | | | | TGTCAAGGGTTGTGGAACAAGCAGTTTACAGGGTGATGT |
| | | | | AAAATTTGCCGAAGTTCTTGAGAAGATGGGCTGCAAGGT |
| | | | | CACCTGGACAGAGAATAGCGTAACTGTTACGGGACCACC |
| | | | | CAGGGATTCATCTGGAAGGAAACATCTGCGCGCTGTCGA |
| | | | | CGTCAACATGAACAAAATGCCAGATGTTGCTATGACTCT |
| | | | | TGCAGTAGTTGCCTTGTATGCTGATGGGCCCACTGCCAT |
| | | | | CAGAGATGTGGCTAGCTGGAGAGT |
| 7 | Amaranthus | cDNAContig | 1554 | ATGGCTCAAGCTACTACCATCAACAATGGTGTCCATACT |
| | palmeri | | | GGTCAATTGCACCATACTTTACCCAAAACCCAGTTACCC |
| | | | | AAATCTTCAAAAACTCTTAATTTTGGATCAAACTTGAGA |
| | | | | ATTTCTCCAAAGTTCATGTCTTTAACCAATAAAAGAGTT |
| | | | | GGTGGGCAATCATCAATTGTTCCCAAGATTCAAGCTTCT |
| | | | | GTTGCTGCTGCAGCTGAGAAACCTTCATCTGTCCCAGAA |
| | | | | ATTGTGTTACAACCCATCAAAGAGATCTCTGGTACTGTT |
| | | | | CAATTGCCTGGGTCAAAGTCTTTATCCAATCGAATCCTT |
| | | | | CTTTTAGCTGCTTTGTCTGAGGGCACAACAGTGGTCGAC |
| | | | | AACTTGCTGTATAGTGATGATATTCTTTATATGTTGGAC |
| | | | | GCTCTCAGAACTCTTGGTTTAAAAGTGGAGGATGATAGT |
| | | | | ACAGCCAAAAGGGCAGTCGTAGAGGGTTGTGGTGGTCTG |
| | | | | TTTCCTGTTGGTAAAGATGGAAAGGAAGAGATTCAACTT |
| | | | | TTCCTTGGTAATGCAGGAACAGCGATGCGCCCATTGACA |
| | | | | GCTGCGGTTGCCGTTGCTGGAGGAAATTCAAGTTATGTG |
| | | | | CTTGATGGAGTACCAAGAATGAGGGAGCGCCCCATTGGG |
| | | | | GATCTGGTAGCAGGTCTAAAGCAACTTGGTTCAGATGTA |
| | | | | GATTGTTTTCTTGGCACAAATTGCCCTCCTGTTCGGGTC |
| | | | | AATGCTAAAGGAGGCCTTCCAGGGGGCAAGGTCAAGCTC |
| | | | | TCTGGATCGGTTAGTAGCCAATATTTAACTGCACTTCTC |
| | | | | ATGGCTACTCCTTTGGGTCTTGGAGACGTGGAGATTGAG |
| | | | | ATAGTTGATAAATTGATTTCTGTACCGTATGTTGAAATG |
| | | | | ACAATAAAGTTGATGGAACGCTTTGGAGTATCCGTAGAA |
| | | | | CATAGTGATAGTTGGGACAGGTTCTACATTCGAGGTGGT |
| | | | | CAGAAATACAAATCTCCTGGAAAGGCATATGTTGAGGGT |
| | | | | GATGCTTCAAGTGCTAGCTACTTCCTAGCCGGAGCCGCC |
| | | | | GTCACTGGTGGGACTGTCACTGTCAAGGGTTGTGGAACA |
| | | | | AGCAGTTTACAGGGTGATGTAAAATTTGCCGAAGTTCTT |
| | | | | GAGAAGATGGGTTGCAAGGTCACCTGGACAGAGAATAGT |
| | | | | GTAACTGTTACTGGACCACCCAGGGATTCATCTGGAAAG |
| | | | | AAACATCTGCGTGCTATCGACGTCAACATGAACAAAATG |
| | | | | CCAGATGTTGCTATGACTCTTGCAGTTGTTGCCTTGTAT |
| | | | | GCAGATGGGCCCACCGCCATCAGAGATGTGGCTAGCTGG |
| | | | | AGAGTGAAGGAAACCGAACGGATGATTGCCATTTGCACA |
| | | | | GAACTGAGAAAGCTTGGGGCAACAGTTGAGGAAGGATCT |
| | | | | GATTACTGTGTGATCACTCCGCCTGAAAAGCTAAACCCC |
| | | | | ACCGCCATTGAAACTTATGACGATCACCGAATGGCCATG |
| | | | | GCATTCTCTCTTGCTGCCTGTGCAGATGTTCCCGTCACT |
| | | | | ATCCTTGATCCGGGATGCACCCGTAAAACCTTCCCGGAC |
| | | | | TACTTTGATGTTTTAGAAAAGTTCGCCAAGCAT |
| 8 | Amaranthus | Genomic | 18729 | CCCAAATGAAATTTGACCTATTTTAGTAGGTTATCTTCT |
| | palmeri | | | TCAATGTCTTCTTCAATGCCTCTTTATAAACCCAGCTAC |
| | | | | TGATTTGTATCCCACAAGCCATTGTTCTTCTTCAATTTA |
| | | | | TTCCACTTTGTTCTTCAATCTTCACCTTTCTTCTTCCAT |
| | | | | TGTGTTCTTCCTTCTTCACTATTAACCCTACGCAAGCCC |
| | | | | TCTTCAAATGTATTACAATTTTGAATCAAATAATACAAT |
| | | | | TGATGCTCATAATTAACACCAAGACTAGTGACCACCAAA |
| | | | | TCATTAAGATCAAACCATGAAATGCAATCAGGATCAAGT |
| | | | | GAAAGGCTTCTATATTCCCCACCCACATAATTCAACCCT |
| | | | | ACCCCAGTCCTTTTGAATTTACCCCCATACCAAAACATC |
| | | | | ACTTGAAATTTTTCAAAATTATTAACCTAAAAAAACAAC |
| | | | | ACAATTGAACATAATTACCAATGCATTTCTATAACAACA |
| | | | | AAGAAAACATTAAAGAATCAAAGATTAAAGTGAGGAATG |
| | | | | GCAAAGAAATTACCATGGTTTGATTGAGAACAAGAAGAC |
| | | | | CCAAAATTCGTCTGCACAGCCCCAAAATTTTCGCACAGA |
| | | | | GCAGCAATACCACCCCCAAAATTCGACACTGTTGATAAA |
| | | | | AAATAAACCCTAATTTTTTTGGGAAATTACAGTTGATGA |
| | | | | ATGTGAGTGTTGATTATGGCGTGAAGCTTGATGATTATG |
| | | | | AATGACAATTGTGCTTCAAGTTTTTGAAATTTTGAAGTT |
| | | | | TTGAAGGAAGATGGTGTGAAGGAATGGTAGAACAGGAAA |
| | | | | TGAAGTTAAGGGTATGCCTTTTTGGGTTGAATGTTTATT |
| | | | | TTATGGAATTAAAGAATATGAAAGATCATACTCTAACCT |
| | | | | GCAATAGTAGGTCAAATTTCATTTGGGGGTGCCACGAGC |
| | | | | AAATACACTTGAAAGGTGAGATTATTCATAAATAATCAA |
| | | | | TACTTGGGATTATTCACATAGGTTTGCGAATAGTTCGGA |
| | | | | TTATTCCCAACAATTTTTCCTTAAGATTATAATTAAAAA |
| | | | | ATCCCCAAAAGATGAAAAAAAGAGAAAGCATGTAAAACA |
| | | | | CGCGAATCAGACCGGTCCACTCTTGTTTTAATTTGAGAC |
| | | | | AATTTTGATGTTGAGTCATCCCACACCAACCCCAAAAAA |
| | | | | TTCAACAACAAACTCTTATAATGATTCCCTCTACTCTAC |
| | | | | TAGAGTCTACACCAACCCACTTTCTCTTTGCCCACCAAA |
| | | | | ACTTTGGTTTGGTAAGAACTAAGCCCTCTTCTTTCCCTT |
| | | | | CTCTCTCTTAAAAGCCTAAAATCCACCTAACTTTTTCAG |
| | | | | CCAACAAACAACGCCAAATTCAGAGGAAGAATAATGGCT |
| | | | | CAAGCTACTACCATCAACAATGGTGTCCATACTGGTCAA |
| | | | | TTGCACCATACTTTACCCAAAACCCAGTTACCCAAATCT |
| | | | | TCAAAAACTCTTAATTTTGGATCAAACTTGAGAATTTCT |
| | | | | CCAAAGTTCATGTCTTTAACCAATAAAAGAGTTGGTGGG |
| | | | | CAATCATCAATTGTTCCCAAGATTCAAGCTTCTGTTGCT |
| | | | | GCTGCAGCTGAGAAACCTTCATCTGTCCCAGAAATTGTG |
| | | | | TTACAACCCATCAAAGAGATCTCTGGTACTGTTCAATTG |
| | | | | CCTGGGTCAAAGTCTTTATCCAATCGAATCCTTCTTTTA |
| | | | | GCTGCTTTGTCTGAGGTATTTATTTCTCAACTGCGAAAA |
| | | | | CAATCTCTATTTGATATTGGAATTTATATTACATACTCC |
| | | | | ATCTTGTTGTAATTGCATTAGTACATACTTATGTTTTGA |
| | | | | CCTTTGTTCGTTTGTTTGTTGAATTGGTAGTGTTGAGAA |
| | | | | TTTGAATCTAATTATTTGTTTTTCCATGTGAATTTAATC |
| | | | | TGATTAAATCCACTTCTTATTTATGTTAAGTTGCAATGA |
| | | | | TGTTTGCCAAACGGTTATCATTGAAGGATAAGTTCGCCT |
| | | | | ACTTTTGACCCTCCCAACTTCGCGTTGGTAGAGCCATTT |
| | | | | TATGTTATTGGGGGAAAGTAGAAAGATTTATTTGTTTTG |
| | | | | CCATTCGAAATAGTAGCGTTCGTGATTCTGATTTGGGTG |
| | | | | TCTTTATAGATATGATATATGGGTTATTCATGTAATGTG |
| | | | | TAGGTTTATGCATTATGTTGGATGCATGTCTGGTGTTAT |
| | | | | TGCTGTAAATGGATGAATGTTGTTATTTGGAGACATTTT |
| | | | | TTCATTCATTTTTTCCCTTTTTAATTGGAACTGGAAGAG |
| | | | | GGAAAGTTATTGGGAGTAATTAAAAGGTTGTGAGTTCGA |
| | | | | TACACTGCATCAAAGACGAAGAACTTGACATAGATGTTG |
| | | | | AAGGCTAATCCTTATCACTGCTTGAATTCAATATGTATC |
| | | | | TGAAAATTTTACCCCTCTATATGCATCTGTTTTTGCTAA |
| | | | | TAAAGTGTTTTTGGACTATCATGTTTTGTGATGCTTAAG |
| | | | | AGGGTGATATTACTGAGATAAATGGAAATATCAAAATAA |
| | | | | CATCTATTGTGAAGTAGTTTTAGAGGCTTTTGATTGGTG |
| | | | | CTTCGACTTTGGATTTACTTGCATCCTAGATTGACTCAG |
| | | | | TTTGTGCAATCTGAAAATGATTTCATCATGGTATGAATA |
| | | | | TGGTTCAAAAACAAGGCTGCATCTCATCGAACACGTTGT |
| | | | | AAAGATTTAAAATTAATCAAATTGATATTTCTAGCATTG |
| | | | | TAAAGGCTTAAAAAACTGTATCTCAGGCTATATTAGGGA |
| | | | | TTCTCATGCTCTTGACCGATATTTAGGTGTTACGATAAC |
| | | | | CACATCACTCCTACGATCGTTACCAGATGTTTGCACTTT |
| | | | | GTTATGTGTTACAAGAGATAAGTGTTGCATGCAGTGGAT |
| | | | | CCCTTGTGATTTTGTTCTAGGTAGACAGTGTTGTTTTTG |
| | | | | AATTTCAAAGCAGGAATTATAACGAGATTTGATATTAGG |
| | | | | GTTTGAATTTTTTTAAAAGTTTTTTGCATTCCTCCGATT |
| | | | | TGCAACACGGTTTACCTACTGTTTATTTGAATTTTTTGT |
| | | | | GTGAGAAAAGGCTTACAGGCTTGCTCTTGTATATGTGTA |
| | | | | TGTATTTGCTTTGTGGTTAAATATGCTGCATGTTGTAAT |
| | | | | GAAAACTCTGCCCGGGGATGGTGGGCTTACACGCCAAAG |
| | | | | AAAAAGATTGTTTTCCACAACTAAAAATATCCCATTGGC |
| | | | | AACAGCGTGCAATTATTTAGGGAATGGTGTTAGAGCATT |
| | | | | AAAATTGGAAAATAAATGAGCTCTCATTTTGTTCAAACC |
| | | | | ATGAGAATTTTCCCCTGGTCCAATATTCAGCGTTTTGTT |
| | | | | TCATTTGTAAAAATTACGATCATATTTCTCTTTAGTGAA |
| | | | | GCAACTGATTGGAAAACTTTGGTATATGCCATGTTTCTT |
| | | | | TCCAAGTTAAAGAGTTCCCAGGCATCATCCTCAATGATC |
| | | | | TTCCTCTATATTCCTGTACAATATTGTTGATAGGAAGTT |
| | | | | CATTCATGCCAATAACAATATGTCTCTTGCGAATTTCTA |
| | | | | GAAGACCAGAAATTTGTTGTGACCTGTGGAGTTCTTCCA |
| | | | | AAAGTATCCTCTGTGCGACGCATGAAAAAAGCCTTTGGG |
| | | | | CTAGACTACTGAGATGCAGCTGCCTGGTAATTCATGCCT |
| | | | | CTCTCCCAAGAGAGTACGAGAAGTCATTTATAGCCGCTT |
| | | | | AAGAGAGCCAAGGATCAATTTAGGCGTGTTCTATTTCCA |
| | | | | TATCTTAATGTATCACTGAAGTTTAGCAAGTAAACAAAC |
| | | | | ATCACAATCCCTGATGCTTGCATAGTCATGGCAAATGTT |
| | | | | ATACTCTTTGTTTACATATGAAAAACCAGATATTACTCC |
| | | | | ATATTTTTAGAAACCAGCAACCAAAGGAGCTTAAATGGT |
| | | | | CCCTGCTCCTAAGTCATATCTCTTGGCAATGGGGTGTTT |
| | | | | GTAGATCTTGAGTGCTGCCAGTCCACTTACTGTAATGCA |
| | | | | ATACATCAATATTGAGCTAGTTTCTCATGGGAAAAAACC |
| | | | | ATAGAAATGGGACAAATTTGATGTTAATGTTCTGTAATC |
| | | | | CAACTTGAGGATTAGTTTTATCACATAAAAGCTACATTG |
| | | | | AAAGTTCTATTATTATTTTGAGTTTGCATCTTATGTTGT |
| | | | | TTTTCCTTTGTGATTTTATCCATTTTCTTAACTAGTTAT |
| | | | | TCGTTTCCTGAAGTTTTTAGTGTCATAACTCCTAATCAC |
| | | | | AATCATGCTACAGGGCACAACAGTGGTCGACAACTTGCT |
| | | | | GTATAGTGATGATATTCTTTATATGTTGGACGCTCTCAG |
| | | | | AACTCTTGGTTTAAAAGTGGAGGATGATAGTACAGCCAA |
| | | | | AAGGGCAGTCGTAGAGGGTTGTGGTGGTCTGTTTCCTGT |
| | | | | TGGTAAAGATGGAAAGGAAGAGATTCAACTTTTCCTTGG |
| | | | | TAATGCAGGAACAGCGATGCGCCCATTGACAGCTGCGGT |
| | | | | TGCCGTTGCTGGAGGAAATTCAAGGTTTGTCCAATTATA |
| | | | | TTCTTTATGTGAGTGTTGTTTTTTGTGTTAGTTTCAATC |
| | | | | ATGAAGGTACTAATGCAGAAGCCGTACCCCTGAAATTTT |
| | | | | CTTATTTTGTATATATCAATTGGTAATTGATGTAAGATA |
| | | | | TTTTTCCGAGAGGAATAAAAAACAGGGGGATAGAGAATA |
| | | | | TTAAAGTATTGTTCTATCACATTAACTTTTTATCAAAGG |
| | | | | TGTACATTGTGTTTGTGAAGTTTATAGAGCTAAAGGGAT |
| | | | | GGAAGGGAAGGGGATTGAAGAAGAGGAGAAAAGAAGAAG |
| | | | | ATCCTCCTTTGAATACCAAGGTTTGAACGGAAGGGAGAA |
| | | | | GGAGGAAACTCTAAACAATATGGAGATGAACTGATGAAG |
| | | | | TTTTTGGATCAGAACCGCTTGAGAATCAGAGTTAAGCCA |
| | | | | TGTGAAAGTCTATGAGCATGACTTCACCTGGTTAATAAT |
| | | | | TTTAAGCTCTCAACTTCTCATCCTCTTTTCTTTGTCGAA |
| | | | | AATGTCATGTCTTCATGTGATACGTGCTTACATAATCGT |
| | | | | TTCTTTTGTAAAGCGATTGTCTCTCCAGATTTCTCCCCT |
| | | | | TACGAAAATAATCCTTGAAGGTTGAAGAAATCCCTTCAT |
| | | | | TTCCTTTTCCCCTATTTCTCTACCCTTCCTACTTTGGTG |
| | | | | AAGGATTTTGTATCCCTCCCTTTTCATGGTCTATAGTGT |
| | | | | TAGATATTCAAACTTAAGCTTCTCAAGTTTCATGTGGGT |
| | | | | TCTGATTATTATTTTATATATGCATTACCAAGGATTCAA |
| | | | | GGTAATTTGAACCAATCAAGACCAGAACCGGATATGAAT |
| | | | | TCTTCAACCTAGTCTGAACTTGTACATCTAAAACATGCT |
| | | | | AGTTACAACTGAAATATGATCAACTTCTATAGCCTATAA |
| | | | | GACTCTCACCTTCATTTGTAGGTTGCCACATAGCACGTA |
| | | | | TTGTCGATCCATCCATCCTCATTATTTGACTCATCAAAT |
| | | | | AAAGGAACCACTCATGTGAAATTCCTGTCCTACAAAATA |
| | | | | ATCCATCTTCCTCATCTCATTTGTATTCATGTAGTTTGC |
| | | | | TTCCTCAATCCTACAAGTAAAAGGACAACTGCGATTCAA |
| | | | | CTCTTGGACCTATTTGACAGTAAATCCACGAATATTAGG |
| | | | | ACAATCACGTTGGTAATGAACCATCGCTTGGCGCTTGAA |
| | | | | ACATTTGATTTCCTCAAAATCCTTTGCTTCCCCCAACAT |
| | | | | TTCATCCTTTGCTTTCCACATTAAAGTTGGTGCCCGAAC |
| | | | | CTCCATAGCCACAAACTTGGTTGTAGACAACACACCAAC |
| | | | | GTTTCTACCTCTAATAGAGATAGGATTTGTATAAGCCTT |
| | | | | ACTCTTCTTAGATCCTTATGTTTCATAGACCTTTTTCAT |
| | | | | CTTGCACGTATCATCAAAAGACAAGTTGGTATGTATCTC |
| | | | | AGGCTTCACGCACAAGTCAACATCCTTATCACCATACCT |
| | | | | CAATATGACAAGCCCTACCTCTCAATCTTCTACAAAGCT |
| | | | | ATAGATCTTCCATCTCAATGCAAGGAACTTCAACACACG |
| | | | | TATAAACTTTTTTTGAATTTAATTGTTCAAAGGAAAAAA |
| | | | | CCTTTCTTTCATGTGCATTTTTATGTCAACATAGCTATT |
| | | | | AATCAACGTCTTTCCTCTTGTACGAGCTAATTCTCAATA |
| | | | | CCTTTAAGCCCACATGAAGCCTTCTTCTTGAGCTTGAAT |
| | | | | TTAAAAAACTGGAAAATTTGCTTTTCGTACGGAGTTCTT |
| | | | | GTTGTTGTAAAAACACTCCGAACTTCTCTCCTATTCACG |
| | | | | ATGATCTTTTGGGTGTAAGGACATACTATCAAAATTTTC |
| | | | | TACGTTATCCTGAAGCCATGATCATCCACCTCGCAATAT |
| | | | | GCTCAACTTTCAGTTCACGCTGATTCAATATCTGCGTGA |
| | | | | ATAGATTGATCAAGCTTGCCATTTGCTCAAGAATAGTTG |
| | | | | AGTTTTCCTCTTGTAATACTCGATTCCTCTCTTCTGTTT |
| | | | | TTTTAGTCATCCTACTATTTGCTAGCGACAATCTCACAA |
| | | | | GAATATAAGAGGGGATTCTCATCTATTATAACGCACTAC |
| | | | | TCTGTACCTAAGGAACTAGTGTGGGTGTCTTATTTTTGT |
| | | | | CCTCTCCTCGTAGGATATAAAAGAGATGTGTATTTGTGA |
| | | | | ATGATTCAACATAAAACAAAAGTATGTAGGCTCTTAGAT |
| | | | | TATACCATCTCATTAACATATGATGAACTCTTACATATG |
| | | | | CTCCTTCACATATATTTGTTTTTTTGGGGTCATTTATTC |
| | | | | TAGTAGTCCATTGATATTGAATCCCTTAGTTATGGCATT |
| | | | | ATTGTCCGTGCACTGTCTCAGGAGAATAGATGGATTGTT |
| | | | | ATTGCTTTTTCTGTATCTGATGGTAATACAAAGATTGCA |
| | | | | ACATTTGCTAGACCTTGCTGTTTGGATATAGAAAGAAAA |
| | | | | TTATTTGCCATTCATTTCCAAGGGGTCGAATGTAGCCTT |
| | | | | ATCCTTATTCGTGATAACAAAGAGATTGATTTGTAGTCC |
| | | | | TTACATTTGAAAATCCTGGACTTCACTGAATTTATGTAA |
| | | | | CTGTTGCATGCCATGAAATGGAATACTTTATTGATTATG |
| | | | | TGTTTGGGATATGTAAGCTGAAGAAGGCAATTTCCCAGC |
| | | | | TCCTATTAATGCTATCTACACTTCATATTATCCTTTCTG |
| | | | | ATATAGTTTACTTTTCTTTGCATGTGTCGAATTAGTTAT |
| | | | | GTGCTTGATGGAGTACCAAGAATGAGGGAGCGCCCCATT |
| | | | | GGGGATCTGGTAGCAGGTCTAAAGCAACTTGGTTCAGAT |
| | | | | GTAGATTGTTTTCTTGGCACAAATTGCCCTCCTGTTCGG |
| | | | | GTCAATGCTAAAGGAGGCCTTCCAGGGGGCAAGGTAATG |
| | | | | TGACTAAACTTCTTTATGTTTTGTTAGATTTTGGGTTTT |
| | | | | ACTCCATCTAATTCAATGAATGATGATTCATGCGTCAAT |
| | | | | TTCTTGGTAGCAATTCCTTTCCCTACCTAACTATGACTT |
| | | | | CTCTGATTGACCTTTTCTATGAGGTGGGGAATAGTGTTT |
| | | | | TTAATGTGAGGAAAAGAGAAACCCGGGGTATGAGCTTTA |
| | | | | GCATGATAGAGTATGTATTTGATACTAAAACTGCAAATT |
| | | | | AAGTTGGAATCAAGAATAAGAAGACTTATACAGTATAAA |
| | | | | TCAACAGAGGTGTCTGCTGTGTATATGTGTAATAGACAG |
| | | | | TTATAGTTAGCAGGAATTCAGGAGATAAAATGAAGATGG |
| | | | | TGTTGATGAAACTTAACAGACAATTCAGAAAACAAAGTT |
| | | | | TGAGTAGTAAGTAGACTTTTGAGAGGCTGCTTCTCTCTC |
| | | | | AAATGAGCTATAAGTTCTAACAAAAGTCTCAATACATAA |
| | | | | TTTAGATAATAATCAGATGCCTCTCTCACGCTCCATCCC |
| | | | | TTTATTATCTAGATTTCTTGATTTTTTTTCATAACTTAT |
| | | | | GCAACTTATTTCAGCCTCTTCCTTCATTCCACCTTCTAC |
| | | | | TTGAAATAAAATGCAATCTCTACCTTGTTTCTTTATGGT |
| | | | | TTGTTCATTTTAATAAAGATTTAGTATGAAAGTCAATAT |
| | | | | TGCTTTTGCATTGTTGTTTGTCTAAGATCCTAATGGCAA |
| | | | | GTCCACATAAGATGTTTGTTGGTATATGCTAGGTTATTA |
| | | | | GGATCGGGATTCTACTTAGGATCGTTGAGGAGGTAGGAT |
| | | | | TGAAATAGGTAGAATCGGTTCGTACTTCGTAGGATTGTG |
| | | | | CCATGCTACAAATATGCATTGATGTGCTTTGGATTATTT |
| | | | | GTTATCAATTATATTTGTTCTTCTGTTCAGTTTTAAGGT |
| | | | | GTAAGTAAAAACTTATTCGATTTCATTTATTAAGTTTTG |
| | | | | AAAAAAATACTTTAATAATCACTTTTAAACTGCAAATTG |
| | | | | AAAAAAAATTGCATTTTTTAGTGATGTTTTTTTTTTTTT |
| | | | | GAATATCAGTGATGTTGATATAATTATTTTATAGAATAT |
| | | | | TTATACATAATTGAAATCTTGATTATATGAAAATATTTT |
| | | | | ACGATTGAAACTACTTTTATAGGATCGGATCGTTTGATT |
| | | | | GTAGGATCTTAGAATCGTATTATGATCCTACCACCTAAA |
| | | | | TTTTTGAGCTAGTTCTACCACATTATGACTCTACCTAAG |
| | | | | ATCCGGATCGATTGTTTATTTTTAGATCGTAGAATCGTA |
| | | | | GATCAAAATCGAGACTCTAATATCTATGGGTATATGTGT |
| | | | | TAAATTATTAGTCAGTAGAACAATTCTCTTTTTCTTGGT |
| | | | | AAATAAAATCGTACGATACTTTAGTCCGGGGGGCGCGCT |
| | | | | TTGTGTCCTGTACGGTAAGTATCCTGTGACAAAACTGTA |
| | | | | CTTCAGGTGTCTTCTTCACTCTTGGGAAAGTGTAAATGT |
| | | | | CTTTTGTCCCGATTAAGGAAGATTTTATGAGAAATTTTC |
| | | | | CCACATGCTTGGCACCAATTTGTTTTTATTTAGTAGAAG |
| | | | | AAGAAATTATGTATAACATGCATACTCAGGATGGTAGTG |
| | | | | AATATGAAATGAAGAAAGGAGGTAAAGTTGCATGCTGGA |
| | | | | AACTTATAAAGAGATGATTCATTCAAAATTTTGATATTC |
| | | | | CTAATAGCATAGTTGTGGTTTTCAATTTCACAGTCATGA |
| | | | | AGTAAGAACCTCTCTAATATTATCCATTTGTTTTGTGAA |
| | | | | TTGATCAAATTAGAACTACAATTTCAATGTTTGTTGTTA |
| | | | | ATGAGAAGTTCTAGCATAGTTGTGGTTTTCAATTTCACA |
| | | | | GTCATGAAGTAAGAACCTCTCTAATATTATCGATTTGTT |
| | | | | TTGTAAACTGTTTGCAGGTCAAGCTCTCTGGATCGGTTA |
| | | | | GTAGCCAATATTTAACTGCACTTCTCATGGCTACTCCTT |
| | | | | TGGGTCTTGGAGACGTGGAGATTGAGATAGTTGATAAAT |
| | | | | TGATTTCTGTACCGTATGTTGAAATGACAATAAAGTTGA |
| | | | | TGGAACGCTTTGGAGTATCCGTAGAACATAGTGATAGTT |
| | | | | GGGACAGGTTCTACATTCGAGGTGGTCAGAAATACAAGT |
| | | | | AAGTCTCTCATCTTATATTACATGTCCTTTTAACGTGTC |
| | | | | TCCATTAGTAGACTGAAAACACATGTAAATACATCAGAT |
| | | | | CTCCTGGAAAGGCATATGTTGAGGGTGATGCTTCAAGTG |
| | | | | CTAGCTACTTCCTAGCCGGAGCCGCCGTCACTGGTGGGA |
| | | | | CTGTCACTGTCAAGGGTTGTGGAACAAGCAGTTTACAGG |
| | | | | TATAATGTTAACCCTTACCCTTCACATTGTTCTGCTAAA |
| | | | | TTCTAGAGGACCCTTTCAATTCTGGGTGGGATAAGCACG |
| | | | | GCAATTTGACCGCAAAAAAATTGCAAAATTATTCTGCTG |
| | | | | ATAGAACATCTCGAGATGAGATCATATTGAGTTTTGGCG |
| | | | | TCAACATAAACCTAATCAAATAATGAAAAATACAAACAT |
| | | | | CATATGGTTTCTTTTGTCTTTATGACTAGACACTCTCTA |
| | | | | TTATTCCTTGATTGGGATCTTATTTGAAATTGCTGTGTA |
| | | | | GCCTACACCTCATGTTCAGATTTTGTTCGTATACCAGAC |
| | | | | TTTTCTTGATTGGGATCTTATTTGTCCCCTGGATTTTGC |
| | | | | ATAGGGTGATGTAAAATTTGCCGAAGTTCTTGAGAAGAT |
| | | | | GGGTTGCAAGGTCACCTGGACAGAGAATAGTGTAACTGT |
| | | | | TACTGGACCACCCAGGGATTCATCTGGAAAGAAACATCT |
| | | | | GCGTGCTATCGACGTCAACATGAACAAAATGCCAGATGT |
| | | | | TGCTATGACTCTTGCAGTTGTTGCCTTGTATGCAGATGG |
| | | | | GCCCACCGCCATCAGAGATGGTATGCTTAACTCTTTTCA |
| | | | | TTGAACTGTGGCTTATGTAGACTCTTTCAAATATTGATA |
| | | | | ATGAAATTTAGTGTGTCATAAGAAAATCGGAATTTGGAC |
| | | | | TTGTTTTTGTTTTGGAATATTCAAACAGCTAGAAAGATG |
| | | | | TTTTTTTTGCTCTAATGGTGGTTAAACTATCACTGTCCT |
| | | | | TGATGGGAAATTATGATTTTTGCTGTCCCCAATGTGTTT |
| | | | | ATTGGCATATCTTGATACAATTAAGTGAGGGACCACTTT |
| | | | | GCACCATTAAGTTTCTCATAGTCATCACCATTTCTAAAT |
| | | | | AATTAAAATTTAGTATTTTGTAGACTTGTTATGAAATGA |
| | | | | CGTTAATTTTTAACAATACTTAATGGTCTTAAAGGGGTG |
| | | | | TTTGGGAAATGACTGCTGATTAAAATTGTTTTGACTAGA |
| | | | | TGATTTTTATCAACTGATTTGACCTATTGAATTTGAACA |
| | | | | TGCTTTTAGGAATAGCTTGTTCAAAAATAGCTTCTTCAG |
| | | | | AACAATAAGTTGTTTCAATCAACTAATATACCAAACACT |
| | | | | AACCAATTATTTACAATTGTGCCAAAATAAGCTAAAATT |
| | | | | GTCAAATCAACTATTATGCAACCTCAGGATGTGTTCCGG |
| | | | | GGATATGAATTGAAACCCATCTTTGGCAGAGTAGAGATA |
| | | | | AGACGAAAATTGATCCAATCTTAGGGATGAATGTTGAGA |
| | | | | TATTATTTCCATAAATATACTGTGGTGGCATTTAGGGTT |
| | | | | TTTTATTTAACAAGGGGTGTTTAGTTTGGAGAACTTTTT |
| | | | | ATTGAAAACCTGTTTTCTCCATATTCCCATACTGGGTTG |
| | | | | ACAATGAAAATTTGAAAATTAGGGTTGAAAAGAATTATT |
| | | | | CCTTCCATTATTAGCTTACAAACTTATATAGTTGGATGA |
| | | | | AAATTAAATTTCATTCACTTTCACTCCATCTCCCTTGGT |
| | | | | AGCATTATCGTATTCCATCAAACAAAACAAAAGAAAAGT |
| | | | | AGTAATAATTAACGTTTAATTGGAAAATTGTTTCTCATG |
| | | | | GAAAATGTTCTCCGCCAGACCAAATACTTTCGGAACGAG |
| | | | | GAAGCATTTTGGAATAAAGAACCTTGTGCTTGGATTAAT |
| | | | | ATATTTGTCTATGAGATAGTTTTCTCTAGAGTTTACTTG |
| | | | | TATGTTTATTAACTGAACACGCCTCCTTTGCAATCAAAG |
| | | | | AAAAAGGAATTATTTCACCTCTAAGCATACCGAAAACAT |
| | | | | CGACGCAAAATACATGTCAAGATGTGTAATGATTTTGTT |
| | | | | ATGTGAATTAACAGTGGCTAGCTGGAGAGTGAAGGAAAC |
| | | | | CGAACGGATGATTGCCATTTGCACAGAACTGAGAAAGGT |
| | | | | TAGCAGCCTTTTACATTCTCGAAAGCTGTAATTGTTCTT |
| | | | | GAGTAATATATATTCAAACTATAACTGATGTTATTTTGC |
| | | | | ATTCCTATCAATACATTCAGCTTGGGGCAACAGTTGAGG |
| | | | | AAGGATCTGATTACTGTGTGATCACTCCGCCTGAAAAGC |
| | | | | TAAACCCCACCGCCATTGAAACTTATGACGATCACCGAA |
| | | | | TGGCCATGGCATTCTCTCTTGCTGCCTGTGCAGATGTTC |
| | | | | CCGTCACTATCCTTGATCCGGGATGCACCCGTAAAACCT |
| | | | | TCCCGGACTACTTTGATGTTTTAGAAAAGTTCGCCAAGC |
| | | | | ATTGAGTAGCTATATACGAGATCCTTAAATTGTACGCCG |
| | | | | AAGGTTTTGATTTGAGTCTAATAGTAGATAAAAGGCTAT |
| | | | | AAATAAACTGGCTTTCTGCTTGAGTAATTATGAAATTCT |
| | | | | TTGTATTATGTTTGTGAGATTTTAAGTAGCTTATAAATT |
| | | | | ACAATGTACTAAAGTCTAGAAATAAGTTATGTATCTTTT |
| | | | | AAATCAATGAGAAATGCATACTTGAAAGGCTTGACCTTG |
| | | | | TATTCGTGACCTAAAGAGTACTAACTTTGGAGTTTCCAA |
| | | | | GTCATTTGTTTATCTCATTTTTTTTTAATTTTTGATTTA |
| | | | | AATTGTTTATTTTCATGAGTAATCATGTACTCCCTCCGT |
| | | | | TCCTTTTTGTTTTTCCACCTTACTAATACAGGTAGTTCC |
| | | | | ATAAGTTTTTCCACTTTAGAATACTTTCCATTTTTGGAA |
| | | | | AGTTTTCATCCCAGTTCCCACATTTACTCCTTAAAACCC |
| | | | | CACTTTCCTTACTTTACACTACTATTTAATTATTTTCTC |
| | | | | TCTTATACTTCCAATACAAGTATTACATTATACTATTAT |
| | | | | TTAATTATTTTTTCTCTCATACTTTCAATACAATCATTA |
| | | | | CTTTTCACTACTATGAAGTAATTAAAATAATACCCATTA |
| | | | | CCACCAAAGATTCCATTTTTCTTAATCTTGGTGAAAAAC |
| | | | | CCAAATAGGAACATCAAAAAGGAACGGAGGGAGTATCCA |
| | | | | AAATAAGGGAACTAATTGTTATTTTTACTATTTTTCATT |
| | | | | ACTTTCTAATTGATTCTCCCACCTCTTTAACAATAAAAT |
| | | | | TCCTTTAGTTAGCAAATTCAAAAAAAAAAAATTCCTTTA |
| | | | | GTTAGCTATTTAATTAATTTTGTTTTCCTAATTTGACTA |
| | | | | ATACTTCTTGAAAATTTACCTACAATCCAAGCGATCTCT |
| | | | | TTGAAATTAAATAGGAATAGTGTGTTGGGGAGCTGGCAG |
| | | | | TTATAGAATACGGGTGATCAAAACAAATTACAAGATCGA |
| | | | | TTCACATATGGATTTTCGGATAATGAAAATCGTAATCCG |
| | | | | GATTATATATCGAATATCCGGTTTATTTATTCTTAATTA |
| | | | | TTTTTTGCTTTTTCTAAAACAAAATTGTATTTTATTACA |
| | | | | CCAAGTAGAAGAGTGAAACGTTGAAACTTTGATGTGTTT |
| | | | | AAAGAAGAGACACTTGAAAGATGACTTGACTTAGAGAAG |
| | | | | TGAAACATAAAAAAATGAAATTTGTAAGAGCATATAACA |
| | | | | TTAGATACAAAAGAATATAAAAGGAGAATATATGTAGAT |
| | | | | GATAATTGTAACTGAATTTGCAAGTTGTATAATCAGGCG |
| | | | | TCCAACATGCGTATTTGGAGTAAAGAGATAAGTCCAAGC |
| | | | | AACATAGTTGTCTATGACCATTTTACATTATGGTATGAT |
| | | | | GATTCATGACTACTGAGCTTGTTTGTTGATTAGTCTTGT |
| | | | | GCACTTCTAATATACAATCTTAAATAGCCTCTTTTTATC |
| | | | | TTCTTTTTGTGACTGGTATGTAACATGGCTACATATATT |
| | | | | CTGTGAGTAATCTTTTAATATTCTTTCTAGTTTCCTTTG |
| | | | | TTCTTATCTTGTGTTACTCTAGTCGTATTACTGGACGAA |
| | | | | CTTAACTTCATAACTTTCAGTTCAATGTGCTGAACCTTT |
| | | | | ATGTTCTTTTGAAATTGGGGCGTGGTGTACCCAACGTGC |
| | | | | AGAATCTATTTGTGAGCTTTGGTATAAATGAGCGATTAC |
| | | | | AATGAAAGGAGCACTCTATGATTTTTGCTATGCCAAGCA |
| | | | | AGCCTGGTGATTTTAGTCAGTTTTTGATTTTCCTAATGT |
| | | | | CCTTCCAGCACCATTTAACGGTTAGTTTGGTAATGAAAT |
| | | | | TTGGAAAATGTCTGTATTAGCAAAAGTCAAACTACTTTT |
| | | | | AATGACTTTCACGAGTCTCTTCATCAAGATGTTTGATGT |
| | | | | GTGCATGTATGTGTGCGCGGAAATAGTATCTACTCCTCT |
| | | | | TGATTTACTCAGTTCTCGAACAAAATTTGACTGCAACAG |
| | | | | ACAATATGTAACCTTAAAATGCTTTGACACGCGATCAAT |
| | | | | TTTCAATCTAGATTTGGATTTATGATCAAAGTAAAGAAG |
| | | | | GTTTGATGTAAAAAGCCTAATAAAAGAAGATATTGTTCT |
| | | | | AATGATATCAATTGAAGTCCAATTCTGCCAGATATATCT |
| | | | | ATAGCTTAAAACTAGGGCATTATATACATGCACCGAAAT |
| | | | | GTAAGTAGCAAATCAACAACGATAAAATTAAGAGCTTAA |
| | | | | CTAGTTGAGCAAGAGCTACCCCTCGGAATCAATCAGTCT |
| | | | | CAGTTTTAGCGACTTTTTATCCTTGAATGTCATTTTGTA |
| | | | | AGTTATCTACTTTGAAATATCGAGAATTTTTTCATAGTT |
| | | | | ATATAGGAAGGTCATTAATGAAGAAATTATTTTGAATAA |
| | | | | GTTAGAACTTCAAAATAAACATTTAACTACAAATCATTG |
| | | | | ACAAACCTAGTACATTGCATAGGGATCCATTATCACAAC |
| | | | | TTCCAAAGAAGATTGTAACTTAAACCCTAATTTGTTTCC |
| | | | | AAGCTTGCAATTTCAACAAAATCTAACAAATTCCAACTT |
| | | | | TTTAAGCTTTAAAACCACGTACATTGGACATTTAATTAT |
| | | | | ATCATTCCTCAGGATTCTAACTTATATATAACATTAATT |
| | | | | ATATTACCTAATATACTATAAAATTTAGAATTTAAAATC |
| | | | | TGAAATTTATCACCAAATTACGTGTCAAAGTATATTATT |
| | | | | TTATATTTATCTTTTCATCGTGTTTCCTGATTAACTCTT |
| | | | | TCGGATATATTATTACTCTTGTTAACAATACCCTCAAAT |
| | | | | GTTCATTTGCTTTTTCCCTTATAAAAAATCGGAAAACTT |
| | | | | TACATAGCATGAATAAGGTTTGATGAAACACCATTGTAG |
| | | | | CACTTTTTTTGTTTTTGTATGATAGCAACAAGATTACAA |
| | | | | GTTTATAAAAACACTTAGCAAATTATGTTAAATACAAGC |
| | | | | CTATTATGTTAATTTTGGACTTTTTTTAAATGTTTTTTT |
| | | | | AGATTTATATTTACGATATACTTGTATATAAATAAAACA |
| | | | | AAATTTAAAAATCAAAATTTTCCTCCCAACTTCCTCCCT |
| | | | | TTCCTTGTTAGTTGTCACAACCCCTAACCCAACCATCCT |
| | | | | TTCCCTTGTGTCAACAAAGAGTACTTAAAATTAGATATC |
| | | | | GTATTATTGTAAAATTCAAATTATCATAAGAGCATGATG |
| | | | | TACATGTAACAAGAAGGTCAAACAAAAGGGAGTTAAAAT |
| | | | | CAATTTAGCTTTTTACTAAATTCTTAAAATCTCGCAACG |
| | | | | AGAAAATTAAATATAAGTTAGATTTTTGCATTATTTACT |
| | | | | AAAAGTTATAAATCTATAGGATGAGCTATATGAATTAAA |
| | | | | TGTTTAGGAAATTTAAAATTATACCCAGTTCTCATATGA |
| | | | | ACATCAAATATTACACGGTATCTATAAACAAAAACCGTA |
| | | | | ATTAAAAGCAGTCTACGTTAATTTGAAAATCTCCTTATA |
| | | | | TTAATCAAGGAATCAGATTAAAACTCTATTAGGTTGTGT |
| | | | | CTTAAACTATTTTTTATTTTACATTTATACATTAAAAAA |
| | | | | TTTATTCGAGGGTATATTAAAAATAAATAATATTCTTCA |
| | | | | TAATCTTAGCTAATCCTAATTCCTAACTATCAAATCAAT |
| | | | | GGTTAACACAGTAAATTACCCTCTAATCCCCCAACAGCC |
| | | | | CATTGTTTGTTTGGAAGTGTAAGCATAAAAAACCTCAAT |
| | | | | AATACTAATTAGTGTGCTGTAACCATGGTGTCTATGACG |
| | | | | TGTGTTGGGAGTTGAGAGCAAATAGAATTCTGTGCCAAT |
| | | | | TGAAGGCTAAAACTTAAAACCAACCAAACACTCTTTTAG |
| | | | | AGACGTATTTTAAGTCCAGCCTATCAAAGACAATACCTA |
| | | | | CCTACTGTATTCTTAATGTCAACTTACATTATCCTTAAT |
| | | | | GCCTACTTTCAATATGTTAAATGTCTACTTACATCATTT |
| | | | | TTAATGCATACTTACAGTATTTTAAACAATTTATAACGG |
| | | | | GTCAGCCCAATCAGAGATGGTCTCTCAAACAGACCGTCT |
| | | | | AAGACCGTCTCTCACAAGAATTTGTGCAAGCCCTTAATC |
| | | | | CTCTAAACAAAGATCTCATTCCCTGGTTTTTGTTCCCTT |
| | | | | ACAACTCAACCTTTGCTTTGTTTTGTATAAACAACCTTC |
| | | | | CCTTTTTTATGCTTTCCTTTGCCAGATTTCTAATCTTCC |
| | | | | ATCCCCCAACTAGCCTACATTGTTTCATTGAATAATTCT |
| | | | | AATTAACACTTCTCAATACTTGTACTTACCGAATTCTTA |
| | | | | GTCATTTGTATTTAAAGATTATGCCCACGTTCACTCCCC |
| | | | | CTCCTTGATAATCACGTTTTTGCTAATCCCAATCTTCTT |
| | | | | GATATTACTCATCTTCACCTTTATGAACTTGTAAGCTTT |
| | | | | GTATATATACACCCACCATATGTATATCCTTTCATATTA |
| | | | | AGTACTTCATCATATCCTTAATACTACTTTCAAAAAAAG |
| | | | | GAAAAACACAATAAAAAGGTTAGTTATGGCTCAAATTCA |
| | | | | ACAATTCACTAGCATTTCTTATGCTCCTTCTAAGAGAAA |
| | | | | GGGGAATGGGTTCACTAGGAAGTGTGCCTCTTTAATTAA |
| | | | | AGAGCAACACGCTCGAATCTATATCCTTAGAAGATGTGC |
| | | | | TACAATGCTTCTTTGCTCGTACATTGAAGCCGATGATGA |
| | | | | CTAAACATCTCCTTTATCTTAGCCTTACGTTCTGATGTA |
| | | | | ATCCGGTGCATACTAGTACTAGCTACAGTATATACGTAA |
| | | | | GTCATAACTATGCCTTTTCCCACTCTCCATTGTATACCA |
| | | | | GGCTCGAGCAGTAATGCACCTTCGTTTAATCGCTTAATC |
| | | | | ATCCAAATTTTTGACCCAAAAGGCAATAATTCGATTGGG |
| | | | | TTTTTTCACTTTTTAGTTTGGATGGTTGCTGGTTTAAGA |
| | | | | ATTTTATGGGTGCATTGCTGCTTTTTTGTAAACCAGCAG |
| | | | | TAGTGCTGATGAGGCTTACAAGCATCAATTCAATGCCGC |
| | | | | TCAGAGAACTGGACTTGAGATTTAGAGATGGCTGAAAAT |
| | | | | GGGGTTATATACTTAAACTTATGTTGAATGTAACTCTAA |
| | | | | GAGTTTTATCCTAAAAGATATATATCTGATAATACGACT |
| | | | | TTGAGAGAGTATTATCATTGTGTTGTGTTACTAATCTTT |
| | | | | ATGAGAAAAATGAAATGAAATTGAGTGGATATGTAATAC |
| | | | | TTCAACATTCCAAAGCATATTCTTTTGTTGATATGAACA |
| | | | | ATCCTTTAAGCTTTCAACTAAATGGAAACATATACATAG |
| | | | | ATTTGCATACAAAAATCAGTATACATGATCAAGAAACCT |
| | | | | TTGAGCAATTTAAATGTTGTCAGCCCAGAATTGAGTTCT |
| | | | | GAATACATAAACGCAGTCTAAATTCAACTCAAATGCATT |
| | | | | TAGAATCTGAAAATTTTTTGGTTGCATCAAAATTTATAT |
| | | | | TAAAAAAATCACAATTACAACACTTTGGAGCTCCAAAAC |
| | | | | CTGATATTACACCGATTCTAAATTTGCTCTTCAAATTAA |
| | | | | AATCCCTAGCAACATTGACTATTAATTACTGATCAATTA |
| | | | | AAATCCCTAACAATTTCATCATCAATTCTTAGAAAATTA |
| | | | | AAATCCAGCAACAATCACAAACTAAATCAAATTCAACGC |
| | | | | TAAAACACAAATCAAAACTCATTATACGCACCAGCTTCA |
| | | | | GCATCAAGAAGACCGCCATAAGGATCTTGATCTCCAAAA |
| | | | | CTGGGAACCCTAAGTACACCGTGTAATCCAACAATTACA |
| | | | | GCAGAAATCACACAGGCAACCATCAGATTCATCCAAGAA |
| | | | | TGAGCGATAAACAAAGCGATAATCGTAATTACAGCAAGA |
| | | | | ACGCCAAAAACGATGCGATCGTCAACGATGAACCCCGTA |
| | | | | ATTTCAAGAGGAAAAATGCGAGGATTAAAATAAAGAAAG |
| | | | | TACCAAGATAATGACACCACAAACACGAGAAGGAGTGAG |
| | | | | AGAGGACGTAAAGCGAGAGTAAAGAAGAAGATGATGAGA |
| | | | | AAGACGTTAATGTAGTTAACTCGGAAGTGAGTTAGATTT |
| | | | | GAGTTGAACCGAGTTGTGGCGTCAGAAAGGGATACTGGG |
| | | | | AATGAAAGGGCGGAGATATCGAAAAATTCCGACCATGGT |
| | | | | CTGGTTGTTGTTGCGGCGGGGTAGTCATCGGAAGATGGT |
| | | | | TGTAAAGACATGTTTGATTTGAGATTTTGTTTTTCTTTG |
| | | | | ACGAAGATTTGGGTTGTCGTGTGGTGGATGGCGAATTTC |
| | | | | TAATTACTCTCCATATATTGTTCAATTTTCATATACTTT |
| | | | | ATCATTTCTTTATTCTTACTAATTCACTAACTTTATACC |
| | | | | TCAAAAAAAATAAATTAATTTACTAACTTTATCGACATC |
| | | | | GTCTTATCGGGAGACTACTTCAATTAGATTATCTCATTT |
| | | | | CCCTATTATTTTAAAAAATTATATTATATACGAGTATGT |
| | | | | CCAATTTTCGTTGTGTTTTTTAAATTTTCTTTCATTAAA |
| | | | | GGGCTGCTTGTATGGGTCCGTCTCACAATGAGAGGTCTT |
| | | | | ATACAAGACTTGTTGTTCTTAATTATATAGAGTCAGAGG |
| | | | | CCGGAGGAAAGAGGGTAGCGACAAATTATAATCGTACGA |
| | | | | CGTACCTATCCAAAAAGAGGACAAGGAGAAATGTGTGTA |
| | | | | CTCAATTTATCACATAAAAAATAGATTTATACATAAAGA |
| | | | | AAGTCAGTTCTTATTTATATGAGTTTGAAAAATTATCAA |
| | | | | TTTGTAATATAAACATGTTAGATCTGTTAGCAATATATG |
| | | | | AGTTTTATTTTTTTAATTTTTACAAGTATTTCGAAAATA |
| | | | | ATTATAACGATCGTGTTCAACCCATGTAATAAAGATCTA |
| | | | | GTTGAATAATAAATCATTTTTATAAAAGAAAATGTTACT |
| | | | | TGCTAGATTTGCAACTAAATGAAAACAAAATGAATATAA |
| | | | | AGTAGTAATATGTTATAATACATTTAAAATTAAAATAAT |
| | | | | AACTATTTTATTATCATACATTCACAAGATGAAATATGC |
| | | | | ATTACATCATGTACATATATTATATACTTATATATACTT |
| | | | | ATACCCCTACATAATTTTCTCTACTATTTATTATTCCTT |
| | | | | ATACATACTATATAACCAAAAATATTTATGCTATAATTA |
| | | | | TCAAATAAAAGATGCATACATATACCTAACTATATATTT |
| | | | | CTTCACTAGGAATTCATTACAAAAAAAAAAAAAGAAAAT |
| | | | | TGTCAAAAATAAATCAACTTTTGCTCAATCCTTTAAAAA |
| | | | | TAAACCCAACTATTAATTATTTTCAAATAAATCCATCTA |
| | | | | CTTGATATAACTGCTGAAAATAAATCCAACTAATGAATA |
| | | | | TTCCTAATTGCTTGATCACAAAGAAGCTTTGAAGATGCT |
| | | | | TATAAACAA |
| 9 | Amaranthus | Genomic | 668 | GAACATATGAGTGATCAATTGTGGAGTTAAACTGATCAA |
| | palmeri | | | TATCTATCTAAGTATTTGATGTTTTATGATCTAACTCAA |
| | | | | TTTTGAACGTATAAGCTTCAATTATCGTTTTCAAAATAA |
| | | | | GTATTTCAAAGTCTATAAAGATATTGTATAAGTTTTAGT |
| | | | | TCATTTTGAATAAGTTAATAGTTAAATTATGACATATAA |
| | | | | TTTGACCATGATATTTTATAATCTAACTTAATTTTGAAC |
| | | | | TTTTAATATTCAATTATCGTTTTAAAAATAAGTATTCAA |
| | | | | ATTGTATAGATATATTGTATAACATTTTGTTCAAATTTA |
| | | | | ATTATTGATAGTTTTATTTATTGACCATTCATTTTGAAA |
| | | | | TTCATCCATAGAATGATAGAATAACACTATTTTTTATAT |
| | | | | AACTTCGTTCTAAAATTTTAAAGCATAACCAGAAGTATT |
| | | | | AGGTAGCAATTTATCACTTTAACATCAAAATTGATCACT |
| | | | | TATAGGTTCAAATTGAAACTTTTACTTTAATTGATATGC |
| | | | | TTAAGTACTACTTTAAATTGAAAATTAATATCTTTAAGG |
| | | | | TTAAAATTGATACCTTTAAGATTAGGAAAAATTGTCGGG |
| | | | | AATAATCCGAACTATTTGCAAACTGCTGTGAATAATCCC |
| | | | | ACGTATTGATTATTTATGAATAATCCCACCTTTCAAGTG |
| | | | | TATTT |
| 10 | Amaranthus | Genomic | 13434 | TATCTTTAAGGTTAAAATTGATACCTTTAAGATTAGGAA |
| | palmeri | | | AAATTGTCGGGAATAATCCGAACTATTTGCAAACTGCTG |
| | | | | TGAATAATCCCACGTATTGATTATTTATGAATAATCCCA |
| | | | | CCTTTCAAGTGTATTTGCTCGTGGCACCCCCAAATGAAA |
| | | | | TTTGACCTATTTTAGTAGGTTATCTTCTTCAATGTCTTC |
| | | | | TTCAATGCCTCTTTATAAACCCAGCTACTGATTTGTATC |
| | | | | CCACAAGCCATTGTTCTTCTTCAATTTATTCCACTTTGT |
| | | | | TCTTCAATCTTCACCTTTCTTCTTCCATTGTGTTCTTCC |
| | | | | TTCTTCACTATTAACCCTACGCAAGCCCTCTTCAAATGT |
| | | | | ATTACAATTTTGAATCAAATAATACAATTGATGCTCATA |
| | | | | ATTAACACCAAGACTAGTGACCACCAAATCATTAAGATC |
| | | | | AAACCATGAAATGCAATCAGGATCAAGTGAAAGGCTTCT |
| | | | | ATATTCCCCACCCACATAATTCAACCCTACCCCAGTCCT |
| | | | | TTTGAATTTACCCCCATACCAAAACATCACTTGAAATTT |
| | | | | TTCAAAATTATTAACCTAAAAAAACAACACAATTGAACA |
| | | | | TAATTACCAATGCATTTCTATAACAACAAAGAAAACATT |
| | | | | AAAGAATCAAAGATTAAAGTGAGGAATGGCAAAGAAATT |
| | | | | ACCATGGTTTGATTGAGAACAAGAAGACCCAAAATTCGT |
| | | | | CTGCACAGCCCCAAAATTTTCGCACAGAGCAGCAATACC |
| | | | | ACCCCCAAAATTCGACACTGTTGATAAAAAATAAACCCT |
| | | | | AATTTTTTTGGGAAATTACAGTTGATGAATGTGAGTGTT |
| | | | | GATTATGGCGTGAAGCTTGATGATTATGAATGACAATTG |
| | | | | TGCTTCAAGTTTTTGAAATTTTGAAGTTTTGAAGGAAGA |
| | | | | TGGTGTGAAGGAATGGTAGAACAGGAAATGAAGTTAAGG |
| | | | | GTATGCCTTTTTGGGTTGAATGTTTATTTTATGGAATTA |
| | | | | AAGAATATGAAAGATCATACTCTAACCTGCAATATTAGG |
| | | | | TCAAATTTCATTTGGGGGTGCCACGAGCAAATACACTTG |
| | | | | AAAGGTGAGATTATTCATAAATAATCAATACTTGGGATT |
| | | | | ATTCACATAGGTTTGCGAATAGTTCGGATTATTCCCAAC |
| | | | | AATTTTTCCTTAAGATTATAATTAAAAAATCCCCAAAAG |
| | | | | ATGAAAAAAAGAGAAAGCATGTAAAACACGCGAATCAGA |
| | | | | CCGGTCCACTCTTGTTTTAATTTGAGACAATTTTGATGT |
| | | | | TGAGTCATCCCACACCAACCCCAAAAAATTCAACAACAA |
| | | | | ACTCTTATAATGATTCCCTCTACTCTACTAGAGTCTACA |
| | | | | CCAACCCACTTTCTCTTTGCCCACCAAAACTTTGGTTTG |
| | | | | GTAAGAACTAAGCCCTCTTCTTTCCCTTCTCTCTCTTAA |
| | | | | AAGCCTAAAATCCACCTAACTTTTTCAGCCAACAAACAA |
| | | | | CGCCAAATTCAGAGGAAGAATAATGGCTCAAGCTACTAC |
| | | | | CATCAACAATGGTGTCCATACTGGTCAATTGCACCATAC |
| | | | | TTTACCCAAAACCCAGTTACCCAAATCTTCAAAAACTCT |
| | | | | TAATTTTGGATCAAACTTGAGAATTTCTCCAAAGTTCAT |
| | | | | GTCTTTAACCAATAAAAGAGTTGGTGGGCAATCATCAAT |
| | | | | TGTTCCCAAGATTCAAGCTTCTGTTGCTGCTGCAGCTGA |
| | | | | GAAACCTTCATCTGTCCCAGAAATTGTGTTACAACCCAT |
| | | | | CAAAGAGATCTCTGGTACTGTTCAATTGCCTGGGTCAAA |
| | | | | GTCTTTATCCAATCGAATCCTTCTTTTAGCTGCTTTGTC |
| | | | | TGAGGTATTTATTTCTCAACTGCGAAAACAATCTCTATT |
| | | | | TGATATTGGAATTTATATTACATACTCCATCTTGTTGTA |
| | | | | ATTGCATTAGTACATACTTATGTTTTGACCTTTGTTCGT |
| | | | | TTGTTTGTTGAATTGGTAGTGTTGAGAATTTGAATCTAA |
| | | | | TTATTTGTTTTTCCATGTGAATTTAATCTGATTAAATCC |
| | | | | ACTTCTTATTTATGTTAAGTTGCAATGATGTTTGCCAAA |
| | | | | CGGTTATCATTGAAGGATAAGTTCGCCTACTTTTGACCC |
| | | | | TCCCAACTTCGCGTTGGTAGAGCCATTTTATGTTATTGG |
| | | | | GGGAAAGTAGAAAGATTTATTTGTTTTGCCATTCGAAAT |
| | | | | AGTAGCGTTCGTGATTCTGATTTGGGTGTCTTTATAGAT |
| | | | | ATGATATATGGGTTATTCATGTAATGTGTAGGTTTATGC |
| | | | | ATTATGTTGGATGCATGTCTGGTGTTATTGCTGTAAATG |
| | | | | GATGAATGTTGTTATTTGGAGACATTTTTTCATTCATTT |
| | | | | TTTCCCTTTTTAATTGGAACTGGAAGAGGGAAAGTTATT |
| | | | | GGGAGTAATTAAAAGGTTGTGAGTTCGATACACTGCATC |
| | | | | AAAGACGAAGAACTTGACATAGATGTTGAAGGCTAATCC |
| | | | | TTATCACTGCTTGAATTCAATATGTATCTGAAAATTTTA |
| | | | | CCCCTCTATATGCATCTGTTTTTGCTAATAAAGTGTTTT |
| | | | | TGGACTATCATGTTTTGTGATGCTTAAGAGGGTGATATT |
| | | | | ACTGAGATAAATGGAAATATCAAAATAACATCTATTGTG |
| | | | | AAGTAGTTTTAGAGGCTTTTGATTGGTGCTTCGACTTTG |
| | | | | GATTTACTTGCATCCTAGATTGACTCAGTTTGTGCAATC |
| | | | | TGAAAATGATTTCATCATGGTATGAATATGGTTCAAAAA |
| | | | | CAAGGCTGCATCTCATCGAACACGTTGTAAAGATTTAAA |
| | | | | ATTAATCAAATTGATATTTCTAGCATTGTAAAGGCTTAA |
| | | | | AAAACTGTATCTCAGGCTATATTAGGGATTCTCATGCTC |
| | | | | TTGACCGATATTTAGGTGTTACGATAACCACATCACTCC |
| | | | | TACGATCGTTACCACATGTTACCACATGTTTGCACTTTG |
| | | | | TTATGTGTTACAAGAGATAAGTGTTGCATGCAGTGGATC |
| | | | | CCTTGTGATTTTGTTCTAGGTAGACAGTGTTGTTTTTGA |
| | | | | ATTTCAAAGCAGGAATTATAACGAGATTTGATATTAGGG |
| | | | | TTTGAATTTTTTTAAAAGTTTTTTGCATTCCTCCGATTT |
| | | | | GCAACACGGTTTACCTACTGTTTATTTGAATTTTTTGTG |
| | | | | TGAGAAAAGGCTTACAGGCTTGCTCTTGTATATGTGTAT |
| | | | | GTATTTGCTTTGTGGTTAAATATGCTGCATGTTGTAATG |
| | | | | AAAACTCTGCCCGGGGATGGTGGGCTTACACGCCAAAGA |
| | | | | AAAAGATTGTTTTCCACAACTAAAAATATCCCATTGGCA |
| | | | | ACAGCGTGCAATTATTTAGGGAATGGTGTTAGAGCATTA |
| | | | | AAATTGGAAAATAAATGAGCTCTCATTTTGTTCAAACCA |
| | | | | TGAGAATTTTCCCCTGGTCCAATATTCAGCGTTTTGTTT |
| | | | | CATTTGTAAAAATTACGATCATATTTCTCTTTAGTGAAG |
| | | | | CAACTGATTGGAAAACTTTGGTATATGCCATGTTTCTTT |
| | | | | CCAAGTTAAAGAGTTCCCAGGCATCATCCTCAATGATCT |
| | | | | TCCTCTATATTCCTGTACAATATTGTTGATAGGAAGTTC |
| | | | | ATTCATGCCAAGGGATAACAATATGTCTCTTGCGAATTT |
| | | | | CTAGAAGACCAGAAATTTGTTGTGACCTGTGGAGTTCTT |
| | | | | CCAAAAGTATCCTCTGTGCGACGCATGAAAAAAGCCTTT |
| | | | | GGGCTAGACTACTGAGATGCAGCTGCCTGGTAATTCATG |
| | | | | CCTCTCTCCCAAGAGAGTACGAGAAGTCATTTATAGCCG |
| | | | | CTTAAGAGAGCCAAGGATCAATTTAGGCGTGTTCTATTT |
| | | | | CCATATCTTAATGTATCACTGAAGTTTAGCAAGTAAACA |
| | | | | AACATCACAATCCCTGATGCTTGCATAGTCATGGCAAAT |
| | | | | GTTATACTCTTTGTTTACATATGAAAAACCAGATATTAC |
| | | | | TCCATATTTTTAGAAACCAGCAACCAAAGGAGCTTAAAT |
| | | | | GGTCCCTGCTCCTAAGTCATATCTCTTGGCAATGGGGTG |
| | | | | TTTGTAGATCTTGAGTGCTGCCAGTCCACTTACTGTAAT |
| | | | | GCAATACATCAATATTGAGCTAGTTTCTCATGGGAAAAA |
| | | | | ACCATAGAAATGGGACAAATTTGATGTTAATGTTCTGTA |
| | | | | ATCCAACTTGAGGATTAGTTTTATCACATAAAAGCTACA |
| | | | | TTGAAAGTTCTATTATTATTTTGAGTTTGCATCTTATGT |
| | | | | TGTTTTTCCTTTGTGATTTTATCCATTTTCTTAACTAGT |
| | | | | TATTCGTTTCCTGAAGTTTTTAGTGTCATAACTCCTAAT |
| | | | | CACAATCATGCTACAGGGCACAACAGTGGTCGACAACTT |
| | | | | GCTGTATAGTGATGATATTCTTTATATGTTGGACGCTCT |
| | | | | CAGAACTCTTGGTTTAAAAGTGGAGGATGATAGTACAGC |
| | | | | CAAAAGGGCAGTCGTAGAGGGTTGTGGTGGTCTGTTTCC |
| | | | | TGTTGGTAAAGATGGAAAGGAAGAGATTCAACTTTTCCT |
| | | | | TGGTAATGCAGGAACAGCGATGCGCCCATTGACAGCTGC |
| | | | | GGTTGCCGTTGCTGGAGGAAATTCAAGGTTTGTCCAATT |
| | | | | ATATTCTTTATGTGAGTGTTGTTTTTTGTGTTAGTTTCA |
| | | | | ATCATGAAGGTACTAATGCAGAAGCCGTACCCCTGAAAT |
| | | | | TTTCTTATTTTGTATATATCAATTGGTAATTGATGTAAG |
| | | | | ATATTTTTCCGAGAGGAATAAAAAACAGGGGGATAGAGA |
| | | | | ATATTAAAGTATTGTTCTATCACATTAACTTTTTATCAA |
| | | | | AGGTGTACATTGTGTTTGTGAAGTTTATAGAGCTAAAGG |
| | | | | GATGGAAGGGAAGGGGATTGAAGAAGAGGAGAAAAGAAG |
| | | | | AAGATCCTCCTTTGAATACCAAGGTTTGAACGGAAGGGA |
| | | | | GAAGGAGGAAACTCTAAACAATATGGAGATGAACTGATG |
| | | | | AAGTTTTTGGATCAGAACCGCTTGAGAATCAGAGTTAAG |
| | | | | CCATGTGAAAGTCTATGAGCATGACTTCACCTGGTTAAT |
| | | | | AATTTTAAGCTCTCAACTTCTCATCCTCTTTTCTTTGTC |
| | | | | GAAAATGTCATGTCTTCATGTGATACGTGCTTACATAAT |
| | | | | CGTTTCTTTTGTAAAGCGATTGTCTCTCCAGATTTCTCC |
| | | | | CCTTACGAAAATAATCCTTGAAGGTTGAAGAAATCCCTT |
| | | | | CATTTCCTTTTCCCCTATTTCTCTACCCTTCCTACTTTG |
| | | | | GTGAAGGATTTTGTATCCCTCCCTTTTCATGGTCTATAG |
| | | | | TGTTAGATATTCAAACTTAAGCTTCTCAAGTTTCATGTG |
| | | | | GGTTCTGATTATTATTTTATATATGCATTACCAAGGATT |
| | | | | CAAGGTAATTTGAACCAATCAAGACCAGAACCGGATATG |
| | | | | AATTCTTCAACCTAGTCTGAACTTGTACATCTAAAACAT |
| | | | | GCTAGTTACAACTGAAATATGATCAACTTCTATAGCCTA |
| | | | | TAAGACTCTCACCTTCATTTGTAGGTTGCCACATAGCAC |
| | | | | GTATTGTCGATCCATCCATCCTCATTATTTGACTCATCA |
| | | | | AATAAAGGAACCACTCATGTGAAATTCCTGTCCTACAAA |
| | | | | ATAATCCATCTTCCTCATCTCATTTGTATTCATGTAGTT |
| | | | | TGCTTCCTCAATCCTACAAGTAAAAGGACAACTGCGATT |
| | | | | CAACTCTTGGACCTATTTGACAGTAAATCCACGAATATT |
| | | | | AGGACAATCACGTTGGTAATGAACCATCGCTTGGCGCTT |
| | | | | GAAACATTTGATTTCCTCAAAATCCTTTGCTTCCCCCAA |
| | | | | CATTTCATCCTTTGCTTTCCACATTAAAGTTGGTGCCCG |
| | | | | AACCTCCATAGCCACAAACTTGGTTGTAGACAACACACC |
| | | | | AACGTTTCTACCTCTAATAGAGATAGGATTTGTATAAGC |
| | | | | CTTACTCTTCTTAGATCCTTATGTTTCATAGACCTTTTT |
| | | | | CATCTTGCACGTATCATCAAAAGACAAGTTGGTATGTAT |
| | | | | CTCAGGCTTCACGCACAAGTCAACATCCTTATCACCATA |
| | | | | CCTCAATATGACAAGCCCTACCTCTCAATCTTCTACAAA |
| | | | | GCTATAGATCTTCCATCTCAATGCAAGGAACTTCAACAC |
| | | | | ACGTATAAACTTTTTTTGAATTTAATTGTTCAAAGGAAA |
| | | | | AAACCTTTCTTTCATGTGCATTTTTATGTCAACATAGCT |
| | | | | ATTAATCAACGTCTTTCCTCTTGTACGAGCTAATTCTCA |
| | | | | ATACCTTTAAGCCCACATGAAGCCTTCTTCTTGAGCTTG |
| | | | | AATTTAAAAAACTGGAAAATTTGCTTTTCGTACGGAGTT |
| | | | | CTTGTTGTTGTAAAAACACTCCGAACTTCTCTCCTATTC |
| | | | | ACGATGATCTTTTGGGTGTAAGGACATACTATCAAAATT |
| | | | | TTCTACGTTATCCTGAAGCCATGATCATCCACCTCGCAA |
| | | | | TATGCTCAACTTTCAGTTCACGCTGATTCAATATCTGCG |
| | | | | TGAATAGATTGATCAAGCTTGCCATTTGCTCAAGAATAG |
| | | | | TTGAGTTTTCCTCTTGTAATACTCGATTCCTCTCTTCTG |
| | | | | TTTTTTTAGTCATCCTACTATTTGCTAGCGACAATCTCA |
| | | | | CAAGAATATAAGAGGGGATTCTCATCTATTATAACGCAC |
| | | | | TACTCTGTACCTAAGGAACTAGTGTGGGTGTCTTATTTT |
| | | | | TGTCCTCTCCTCGTAGGATATAAAAGAGATGTGTATTTG |
| | | | | TGAATGATTCAACATAAAACAAAAGTATGTAGGCTCTTA |
| | | | | GATTATACCATCTCATTAACATATGATGAACTCTTACAT |
| | | | | ATGCTCCTTCACATATATTTGTTTTTTTGGGGTCATTTA |
| | | | | TTCTAGTAGTCCATTGATATTGAATCCCTTAGTTATGGC |
| | | | | ATTATTGTCCGTGCACTGTCTCAGGAGAATAGATGGATT |
| | | | | GTTATTGCTTTTTCTGTATCTGATGGTAATACAAAGATT |
| | | | | GCAACATTTGCTAGACCTTGCTGTTTGGATATAGAAAGA |
| | | | | AAATTATTTGCCATTCATTTCCAAGGGGTCGAATGTAGC |
| | | | | CTTATCCTTATTCGTGATAACAAAGAGATTGATTTGTAG |
| | | | | TCCTTACATTTGAAAATCCTGGACTTCACTGAATTTATG |
| | | | | TAACTGTTGCATGCCATGAAATGGAATACTTTATTGATT |
| | | | | ATGTGTTTGGGATATGTAAGCTGAAGAAGGCAATTTCCC |
| | | | | AGCTCCTATTAATGCTATCTACACTTCATATTATCCTTT |
| | | | | CTGATATAGTTTACTTTTCTTTGCATGTGTCGAATTAGT |
| | | | | TATGTGCTTGATGGAGTACCAAGAATGAGGGAGCGCCCC |
| | | | | ATTGGGGATCTGGTAGCAGGTCTAAAGCAACTTGGTTCA |
| | | | | GATGTAGATTGTTTTCTTGGCACAAATTGCCCTCCTGTT |
| | | | | CGGGTCAATGCTAAAGGAGGCCTTCCAGGGGGCAAGGTA |
| | | | | ATGTGACTAAACTTCTTTATGTTTTGTTAGATTTTGGGT |
| | | | | TTTACTCCATCTAATTCAATGAATGATGATTCATGCGTC |
| | | | | AATTTCTTGGTAGCAATTCCTTTCCCTACCTAACTATGA |
| | | | | CTTCTCTGATTGACCTTTTCTATGAGGTGGGGAATAGTG |
| | | | | TTTTTAATGTGAGGAAAAGAGAAACCCGGGGTATGAGCT |
| | | | | TTAGCATGATAGAGTATGTATTTGATACTAAAACTGCAA |
| | | | | ATTAAGTTGGAATCAAGAATAAGAAGACTTATACAGTAT |
| | | | | AAATCAACAGAGGTGTCTGCTGTGTATATGTGTAATAGA |
| | | | | CAGTTATAGTTAGCAGGAATTCAGGAGATAAAATGAAGA |
| | | | | TGGTGTTGATGAAACTTAACAGACAATTCAGAAAACAAA |
| | | | | GTTTGAGTAGTAAGTAGACTTTTGAGAGGCTGCTTCTCT |
| | | | | CTCAAATGAGCTATAAGTTCTAACAAAAGTCTCAATACA |
| | | | | TAATTTAGATAATAATCAGATGCCTCTCTCACGCTCCAT |
| | | | | CCCTTTATTATCTAGATTTCTTGATTTTTTTTCATAACT |
| | | | | TATGCAACTTATTTCAGCCTCTTCCTTCATTCCACCTTC |
| | | | | TACTTGAAATAAAATGCAATCTCTACCTTGTTTCTTTAT |
| | | | | GGTTTGTTCATTTTAATAAAGATTTAGTATGAAAGTCAA |
| | | | | TATTGCTTTTGCATTGTTGTTTGTCTAAGATCCTAATGG |
| | | | | CAAGTCCACATAAGATGTTTGTTGGTATATGCTAGGTTA |
| | | | | TTAGGATCGGGATTCTACTTAGGATCGTTGAGGAGGTAG |
| | | | | GATTGAAATAGGTAGAATCGGTTCGTACTTCGTAGGATT |
| | | | | GTGCCATGCTACAAATATGCATTGATGTGCTTTGGATTA |
| | | | | TTTGTTATCAATTATATTTGTTCTTCTGTTCAGTTTTAA |
| | | | | GGTGTAAGTAAAAACTTATTCGATTTCATTTATTAAGTT |
| | | | | TTGAAAAAAATACTTTAATAATCACTTTTAAACTGCAAA |
| | | | | TTGAAAAAAAATTGCATTTTTTAGTGATGTTTTTTTTTT |
| | | | | TTTGAATATCAGTGATGTTGATATAATTATTTTATAGAA |
| | | | | TATTTATACATAATTGAAATCTTGATTATATGAAAATAC |
| | | | | TTTACGATTGAAACTACTTTTATAGGATCGGATCGTTTG |
| | | | | ATTGTAGGATCTTAGAATCGTATTATGATCCTACCACCT |
| | | | | AAATTTTTGAGCTAGTTCTACCACATTATGACTCTACCT |
| | | | | AAGATCCGGATCGATTGTTTATTTTTAGATCGTAGAATC |
| | | | | GTAGATCAAAATCGAGACTCTAATATCTATGGGTATATG |
| | | | | TGTTAAATTATTAGTCAGTAGAACAATTCTCTTTTTCTT |
| | | | | GGTAAATAAAATCGTACGATACTTTAGTCCGGGGGGCGC |
| | | | | GCTTTGTGTCCTGTACGGTAAGTATCCTGTGACAAAACT |
| | | | | GTACTTCAGGTGTCTTCTTCACTCTTGGGAAAGTGTAAA |
| | | | | TGTCTTTTGTCCCGATTAAGGAAGATTTTATGAGAAATT |
| | | | | TTCCCACATGCTTGGCACCAATTTGTTTTTATTTAGTAG |
| | | | | AAGAAGAAATTATGTATAACATGCATACTCAGGATGGTA |
| | | | | GTGAATATGAAATGAAGAAAGGAGGTAAAGTTGCATGCT |
| | | | | GGAAACTTATAAAGAGATGATTCATTCAAAATTTTGATA |
| | | | | TTCCTAATAGCATAGTTGTGGTTTTCAATTTCACAGTCA |
| | | | | TGAAGTAAGAACCTCTCTAATATTATCCATTTGTTTTGT |
| | | | | GAATTGATCAAATTAGAACTACAATTTCAATGTTTGTTG |
| | | | | TTAATGAGAAGTTCTAGCATAGTTGTGGTTTTCAATTTC |
| | | | | ACAGTCATGAAGTAAGAACCTCTCTAATATTATCGATTT |
| | | | | GTTTTGTAAACTGTTTGCAGGTCAAGCTCTCTGGATCGG |
| | | | | TTAGTAGCCAATATTTAACTGCACTTCTCATGGCTACTC |
| | | | | CTTTGGGTCTTGGAGACGTGGAGATTGAGATAGTTGATA |
| | | | | AATTGATTTCTGTACCGTATGTTGAAATGACAATAAAGT |
| | | | | TGATGGAACGCTTTGGAGTATCCGTAGAACATAGTGATA |
| | | | | GTTGGGACAGGTTCTACATTCGAGGTGGTCAGAAATACA |
| | | | | AGTAAGTCTCTCATCTTATATTACATGTCCTTTTAACGT |
| | | | | GTCTCCATTAGTAGACTGAAAACACATGTAAATACATCA |
| | | | | GATCTCCTGGAAAGGCATATGTTGAGGGTGATGCTTCAA |
| | | | | GTGCTAGCTACTTCCTAGCCGGAGCCGCCGTCACTGGTG |
| | | | | GGACTGTCACTGTCAAGGGTTGTGGAACAAGCAGTTTAC |
| | | | | AGGTATAATGTTAACCCTTACCCTTCACATTGTTCTGCT |
| | | | | AAATTCTAGAGGACCCTTTCAATTCTGGGTGGGATAAGC |
| | | | | ACGGCAATTTGACCGCAAAAAAATTGCAAAATTATTCTG |
| | | | | CTGATAGAACATCTCGAGATGAGATCATATTGAGTTTTG |
| | | | | GCGTCAACATAAACCTAATCAAATAATGAAAAATACAAA |
| | | | | CATCATATGGTTTCTTTTGTCTTTATGACTAGACACTCT |
| | | | | CTATTATTCCTTGATTGGGATCTTATTTGAAATTGCTGT |
| | | | | GTAGCCTACACCTCATGTTCAGATTTTGTTCGTATACCA |
| | | | | GACTTTTCTTGATTGGGATCTTATTTGTCCCCTGGATTT |
| | | | | TGCATAGGGTGATGTAAAATTTGCCGAAGTTCTTGAGAA |
| | | | | GATGGGTTGCAAGGTCACCTGGACAGAGAATAGTGTAAC |
| | | | | TGTTACTGGACCACCCAGGGATTCATCTGGAAAGAAACA |
| | | | | TCTGCGTGCTATCGACGTCAACATGAACAAAATGCCAGA |
| | | | | TGTTGCTATGACTCTTGCAGTTGTTGCCTTGTATGCAGA |
| | | | | TGGGCCCACCGCCATCAGAGATGGTATGCTTAACTCTTT |
| | | | | TCATTGAACTGTGGCTTATGTAGACTCTTTCAAATATTG |
| | | | | ATAATGAAATTTAGTGTGTCATAAGAAAATCGGAATTTG |
| | | | | GACTTGTTTTTGTTTTGGAATATTCAAACAGCTAGAAAG |
| | | | | ATGTTTTTTTTGCTCTAATGGTGGTTAAACTATCACTGT |
| | | | | CCTTGATGGGAAATTATGATTTTTGCTGTCCCCAATGTG |
| | | | | TTTATTGGCATATCTTGATACAATTAAGTGAGGGACCAC |
| | | | | TTTGCACCATTAAGTTTCTCATAGTCATCACCATTTCTA |
| | | | | AATAATTAAAATTTAGTATTTTGTAGACTTGTTATGAAA |
| | | | | TGACGTTAATTTTTAACAATACTTAATGGTCTTAAAGGG |
| | | | | GTGTTTGGGAAATGACTGCTGATTAAAATTGTTTTGACT |
| | | | | AGATGATTTTTATCAACTGATTTGACCTATTGAATTTGA |
| | | | | ACATGCTTTTAGGAATAGCTTGTTCAAAAATAGCTTCTT |
| | | | | CAGAACAATAAGTTGTTTCAATCAACTAATATACCAAAC |
| | | | | ACTAACCAATTATTTACAATTGTGCCAAAATAAGCTAAA |
| | | | | ATTGTCAAATCAACTATTATGCAACCTCAGGATGTGTTC |
| | | | | CGGGGATATGAATTGAAACCCATCTTTGGCAGAGTAGAG |
| | | | | ATAAGACGAAAATTGATCCAATCTTAGGGATGAATGTTG |
| | | | | AGATATTATTTCCATAAATATACTGTGGTGGCATTTAGG |
| | | | | GTTTTTTATTTAACAAGGGGTGTTTAGTTTGGAGAACTT |
| | | | | TTTATTGAAAACCTGTTTTCTCCATATTCCCATACTGGG |
| | | | | TTGACAATGAAAATTTGAAAATTAGGGTTGAAAAGAATT |
| | | | | ATTCCTTCCATTATTAGCTTACAAACTTATATAGTTGGA |
| | | | | TGAAAATTAAATTTCATTCACTTTCACTCCATCTCCCTT |
| | | | | GGTAGCATTATCGTATTCCATCAAACAAAACAAAAGAAA |
| | | | | AGTAGTAATAATTAACGTTTAATTGGAAAATTGTTTCTC |
| | | | | ATGGAAAATGTTCTCCGCCAGACCAAATACTTTCGGAAC |
| | | | | GAGGAAGCATTTTGGAATAAAGAACCTTGTGCTTGGATT |
| | | | | AATATATTTGTCTATGAGATAGTTTTCTCTAGAGTTTAC |
| | | | | TTGTATGTTTATTAACTGAACACGCCTCCTTTGCAATCA |
| | | | | AAGAAAAAGGAATTATTTCACCTCTAAGCATACCGAAAA |
| | | | | CATCGACGCAAAATACATGTCAAGATGTGTAATGATTTT |
| | | | | GTTATGTGAATTAACAGTGGCTAGCTGGAGAGTGAAGGA |
| | | | | AACCGAACGGATGATTGCCATTTGCACAGAACTGAGAAA |
| | | | | GGTTAGCAGCCTTTTACATTCTCGAAAGCTGTAATTGTT |
| | | | | CTTGAGTAATATATATTCAAACTATAACTGATGTTATTT |
| | | | | TGCATTCCTATCAATACATTCAGCTTGGGGCAACAGTTG |
| | | | | AGGAAGGATCTGATTACTGTGTGATCACTCCGCCTGAAA |
| | | | | AGCTAAACCCCACCGCCATTGAAACTTATGACGATCACC |
| | | | | GAATGGCCATGGCATTCTCTCTTGCTGCCTGTGCAGATG |
| | | | | TTCCCGTCACTATCCTTGATCCGGGATGCACCCGTAAAA |
| | | | | CCTTCCCGGACTACTTTGATGTTTTAGAAAAGTTCGCCA |
| | | | | AGCATTGAGTAGCTATATACGAGATCCTTAAATTGTACG |
| | | | | CCGAAGGTTTTGATTTGAGTCTAATAGTAGATAAAAGGC |
| | | | | TATAAATAAACTGGCTTTCTGCTTGAGTAATTATGAAAT |
| | | | | TCTTTGTATTATGTTTGTGAGATTTTAAGTAGCTTATAA |
| | | | | ATTACAATGTACTAAAGTCTAGAAATAAGTTATGTATCT |
| | | | | TTTAAATCAATGAGAAATGCATACTTGAAAGGCTTGACC |
| | | | | TTGTATTCGTGACCTAAAGAGTACTAACTTTGGAGTTTC |
| | | | | CAAGTCATTTGTTTATCTCATTTTTTTTTAATTTTTGAT |
| | | | | TTAAATTGTTTATTTTCATGAGTAATCATGTATCTTTCT |
| | | | | TATTCTAACCAAATGTAATACTCCTTCCAACTCTCTTTA |
| | | | | AACGTCCACACTCTGGGCACAGAGTGTAATAGTGTGGTG |
| | | | | GTTGGAGTCTTTTAAGTGATTATAATAATTGTAAATGTG |
| | | | | GTAGTTAGAGTATTTTAAGTAATGTAGGTGGGGTATTAT |
| | | | | GGTCTTGTTGAACATAGGATATTTAGGTAAAAAATCTAT |
| | | | | GCAAAAAAAGGAAAGTAAGCAAATAAAGCGAATTGACCT |
| | | | | GAAAAGAAAAGTGGACATGTATAGTGAGTTGGAGGAAGT |
| | | | | ATTTTTAATTTCGGCAAATTAATCTTAAATGTCGTATTT |
| | | | | TCTTTTATGATAAGTTTTTCGAATACTTTTACTTTCATG |
| | | | | GGACAACTTTACCATTAATATCATCCTCACTTACCCCAT |
| | | | | TTAACAATCAACTGACATAATAATTAAAACATAAATCTA |
| | | | | ATCTTAAAGTTTTGGTCTAATGTCTCAATAATGATTAAT |
| | | | | TTTATCGGACAGATGCCCTCAATAAGTACTTAAAATTAA |
| | | | | TCCATTGTTTTTGCATGCTTTACTTAAATGTTTAATGAT |
| | | | | AAATAACTTTTGGTCTAAATTCTTTAGGAAATAAACGCT |
| | | | | AAAAAAGATTTAGAAACAGTCCCTATTAAACTAATTTGT |
| | | | | TACTTATATTTACAAAAGTTTCTATTTGTTCCATGAAAT |
| | | | | GTATACTACAAAAACTTGATATTTTTGCTTGTCATGTTC |
| | | | | ATTTTCATTTGGTTTGCAAAATGTTGTTTATATTGATTT |
| | | | | TGTGATGTTTATCTGATCTTCAATGCACCAAGGAAAAAT |
| | | | | ATAACTTTTCATTTTGTTGTGCTACCAAAGTCCATTAGT |
| | | | | ATTTAAAGTATGGCAAGAAAAAAAGATAAACAGTTGCTG |
| | | | | AAGACGTCAATTAAATTTCGATTAAAGATCAAACTAAAA |
| | | | | TTGATAAAAAGATGTAAGATGTTTGTTATTATGTAATAC |
| | | | | AATTTGACGTAGTTTTTGACGTTTTTATTTAAATATAAA |
| | | | | AATTGGCCTATTTTTAATTTAACTGTTGTTTGCGTTTTC |
| | | | | GAAAATCCTAATTTTCACGCATTTAAAGACTTTTTATGT |
| | | | | AATGAAAAATAATTAGAGTTTTAAAAAAGTAAACCTCCT |
| | | | | TTAATATAGACCCAAAAGAGACCCAAAGAGAACGCAACA |
| | | | | CATTGCCTAAGAGAAAAAAGTATGAGTTGATCAATAATA |
| | | | | AAAAAAATTTCGATCAATATCTCTCTTAAAACTATGAGG |
| | | | | CATGAGCAATGACAACCTATTTTAGTTTCCTAAATAAAA |
| | | | | TTTGGAGGATTGGTAGTTCCCATGGCAATGCAATTGAGT |
| | | | | TAAAATTAGGGTTTTAAAAAAAGTAAACATCCTTAAATC |
| | | | | ATAGATCCAAAGAGAACAACGCACACTACAACATAATTT |
| | | | | GTTTTTAGTAGGATATAT |
| 11 | Amaranthus | Genomic | 38 | ATATTTAATTTAAATGTCACTATTACAAATTTCTTATA |
| | palmeri | | | |
| 12 | Amaranthus | cDNA | 1911 | AAACTTTGGTTTGGTAAGAACTAAGCCCTCTTCTTTCCC |
| | palmeri | | | TTCTCTCTCTTAAAAGCCTAAAATCCACCTAACTTTTTC |
| | | | | AGCCAACAAACAACGCCAAATTCAGAGAAAGAATAATGG |
| | | | | CTCAAGCTACTACCATCAACAATGGTGTCCATACTGGTC |
| | | | | AATTGCACCATACTTTACCCAAAACCCACTTACCCAAAT |
| | | | | CTTCAAAAACTCTTAATTTTGGATCAAACTTGAGAATTT |
| | | | | CTCCAAAGTTCATGTCTTTAACCAATAAAAGAGTTGGTG |
| | | | | GGCAATCATCAATTGTTCCCAAGATTCAAGCTTCTGTTG |
| | | | | CTGCTGCAGCTGAGAAACCTTCATCTGTCCCAGAAATTG |
| | | | | TGTTACAACCCATCAAAGAGATCTCTGGTACTGTTCAAT |
| | | | | TGCCTGGGTCAAAGTCTTTATCCAATCGAATCCTTCTTT |
| | | | | TAGCTGCTTTGTCTGAGGGCACAACAGTGGTCGACAACT |
| | | | | TGCTGTATAGTGATGATATTCTTTATATGTTGGACGCTC |
| | | | | TCAGAACTCTTGGTTTAAAAGTGGAGGATGATAGTACAG |
| | | | | CCAAAAGGGCAGTCGTAGAGGGTTGTGGTGGTCTGTTTC |
| | | | | CTGTTGGTAAAGATGGAAAGGAAGAGATTCAACTTTTCC |
| | | | | TTGGTAATGCAGGAACAGCGATGCGCCCATTGACAGCTG |
| | | | | CGGTTGCCGTTGCTGGAGGAAATTCAAGTTATGTGCTTG |
| | | | | ATGGAGTACCAAGAATGAGGGAGCGCCCCATTGGGGATC |
| | | | | TGGTAGCAGGTCTAAAGCAACTTGGTTCAGATGTAGATT |
| | | | | GTTTTCTTGGCACAAATTGCCCTCCTGTTCGGGTCAATG |
| | | | | CTAAAGGAGGCCTTCCAGGGGGCAAGGTCAAGCTCTCTG |
| | | | | GATCGGTTAGTAGCCAATATTTAACTGCACTTCTCATGG |
| | | | | CTACTCCTTTGGGTCTTGGAGACGTGGAGATTGAGATAG |
| | | | | TTGATAAATTGATTTCTGTACCGTATGTTGAAATGACAA |
| | | | | TAAGGTTGATGGAACGCTTTGGAGTATCCGTAGAACATA |
| | | | | GTGATAGTTGGGACAGGTTCTACATTCGAGGTGGTCAGA |
| | | | | AATACAAATCTCCTGGAAAGGCATATGTAGAGGGGGACG |
| | | | | CTTCTAGTGCTAGCTACTTCCTAGCAGGAGCCGCCGTCA |
| | | | | CTGGTGGGACTGTGACTGTCAAGGGTTGTGGAACAAGCA |
| | | | | GTTTACAGGGTGATGTAAAATTTGCCGAAGTTCTTGAGA |
| | | | | AGATGGGTTGCAAGGTCACCTGGACAGAGAATAGTGTAA |
| | | | | CTGTTACTGGACCACCCAGGGATTCATCTGGAAGGAAAC |
| | | | | ATCTGCGTGCTATCGACGTCAACATGAACAAAATGCCAG |
| | | | | ATGTTGCTATGACTCTTGCAGTTGTTGCCTTGTATGCAG |
| | | | | ATGGGCCCACCGCCATCAGAGATGTGGCTAGCTGGAGAG |
| | | | | TGAAGGAAACCGAACGGATGATTGCCATTTGCACAGAAC |
| | | | | TGAGAAAGCTTGGGGCAACAGTTGAGGAAGGATCTGATT |
| | | | | ACTGTGTGATCACTCCGCCTGAAAAGCTAAACCCCACCG |
| | | | | CCATTGAAACTTATGACGATCACCGAATGGCCATGGCAT |
| | | | | TCTCTCTTGCTGCCTGTGCAGATGTTCCCGTCACTATCC |
| | | | | TTGATCCGGGATGCACCCGTAAAACCTTCCCGGACTACT |
| | | | | TTGATGTTTTAGAAAAGTTCGCCAAGCATTGAGTAGCTA |
| | | | | TATACGAGATCCTTAAATTGTACGCCGAAGGTTTTGATT |
| | | | | TGAGTCTAATAGTAGATAAAAGGCTATAAATAAACTGGC |
| | | | | TTTCTGCTTGAGTAATTATGAAATTCTTTGTATTATGTT |
| | | | | TGTGAGATTTTAAGTAGCTTATAAATTACAATGTACTAA |
| | | | | AGTCTAGAAATAAGTTATGTATCTTTTAAATCAATGAGA |
| | | | | AATGCATACTTGAAAGGCTTGACCTTGTATTTGTGACCT |
| 13 | Amaranthus | cDNA | 1554 | ATGGCTCAAGCTACTGCCATCAACAATGGTGTCCAAACT |
| | rudis | Contig | | GGTCAATTGCACCATACTTTACCCAAAACCCACTTACCC |
| | | | | AAATCTTCAAAAATTGTTAATTTTGGATCAAACTTGAGA |
| | | | | ATTTCTCCAAAGTTCATGTCTTTAACCATTAAAAGAGTT |
| | | | | GGTGGGCAATCATCAATTATTCCCAAGATTCAAGCTTCA |
| | | | | GTTGCTGCTGCAGCTGAGAAGCCTTCATCTGTCCCAGAA |
| | | | | ATTGTGTTACAACCCATCAAAGAGATCTCTGGTACCATT |
| | | | | CAATTGCCTGGGTCAAAGTCTCTATCTAATCGAATCCTT |
| | | | | CTTTTAGCTGCTTTGTCTGAGGGCACAACAGTGGTCGAC |
| | | | | AACTTGCTGTATAGTGATGATATTCTTTATATGTTGGAC |
| | | | | GCTCTCAGAACTCTTGGTTTAAAAGTGGATGATGATAAT |
| | | | | ACAGACAAAAGGGCAGTCGTGGAGGGTTGTGGTGGTCTG |
| | | | | TTTCCTGTTGGTAAAGATGGAAAGGAAGAGATTCAACTT |
| | | | | TTCCTTGGAAATGCAGGAACAGCGATGCGCCCATTGACA |
| | | | | GCTGCGGTTGCCGTTGCTGGAGGAAATTCAAGCTATGTT |
| | | | | CTTGACGGAGTACCAAGAATGAGGGAGCGCCCCATTGGG |
| | | | | GATCTGGTAGCAGGTCTAAAGCAACTTGGTTCAGATGTT |
| | | | | GACTGTTTTCTTGGCACAAATTGCCCTCCTGTTCGGGTC |
| | | | | AATGCTAAAGGAGGCCTTCCAGGGGGCAAGGTCAAGCTC |
| | | | | TCTGGATCGGTTAGTAGCCAATATTTAACTGCACTTCTG |
| | | | | ATGGCTACTCCTTTGGGTCTTGGAGATGTGGAGATTGAG |
| | | | | ATAGTTGATAAATTGATTTCCGTACCGTATGTTGAAATG |
| | | | | ACAATAAGGTTGATGGAACGCTTTGGAGTATCTGTTGAA |
| | | | | CATAGTGATAGTTGGGACAGGTTCTTCATCCGAGGTGGT |
| | | | | CAGAAATACAAATCTCCTGGAAAGGCATATGTTGAGGGT |
| | | | | GACGCTTCAAGTGCTAGCTACTTCCTAGCTGGAGCTGCC |
| | | | | GTCACTGGGGGGACTGTGACTGTCAAGGGTTGTGGAACA |
| | | | | AGCAGTTTACAGGGTGATGTAAAATTTGCCGAAGTTCTT |
| | | | | GAGAAGATGGGTTGCAAGGTCACCTGGACAGACAATAGC |
| | | | | GTAACTGTTACTGGACCACCCAGGGAATCATCTGGAAGG |
| | | | | AAACATTTGCGCGCTATCGACGTCAACATGAATAAAATG |
| | | | | CCAGATGTTGCTATGACTCTTGCAGTTGTTGCCTTGTAT |
| | | | | GCAGATGGGCCCACCGCCATCAGAGATGTGGCTAGCTGG |
| | | | | AGAGTGAAGGAAACCGAACGGATGATTGCCATTTGCACA |
| | | | | GAACTGAGAAAGCTTGGGGCAACAGTTGAGGAAGGATCT |
| | | | | GATTACTGTGTGATCACTCCGCCTGAAAAGCTGATACCC |
| | | | | ACCGCCATCGAAACTTATGACGATCACCGAATGGCCATG |
| | | | | GCATTCTCTCTTGCTGCCTGTGCTGATGTTCCCGTCACT |
| | | | | ATCCTTGATCCGGGATGTACACGTAAAACCTTCCCGGAC |
| | | | | TACTTTGATGTCTTAGAAAAGTTCGCCAAGCAT |
| 14 | Amaranthus | Genomic | 2425 | TGATACAAAGATTGCAACATTTGCAAGACCTTGCTGTTC |
| | rudis | | | GGATTTAGAGCGAAATCTATTTGCCATTAATTTCGAATG |
| | | | | GGTCGAATTTAGCCTTATCCTTATTCGTGATAACAAAGA |
| | | | | GATTGCTTTGAAGTCCTTACGTTTGAAAATCCTGGACTT |
| | | | | CACTGAATTAATGTAATTTTCCAGGATTTCTGTTACGTG |
| | | | | CCATGAAATGGAATACTTTATTGATTATGTGCTAGGGAT |
| | | | | AAATAAGCTTAAGAAGGCAATTTCCCAGGTCCTATTAAT |
| | | | | GCTACCTACACTTCATATTAACCTTTCTGATATAGTTTT |
| | | | | TCTTTTCTTTGCATGTATTGATTTAGCTATGTTCTTGAC |
| | | | | GGAGTACCAAGAATGAGGGAGCGCCCCATTGGGGATCTG |
| | | | | GTAGCAGGTCTAAAGCAACTTGGTTCAGATGTTGACTGT |
| | | | | TTTCTTGGCACAAATTGCCCTCCTGTTCGGGTCAATGCT |
| | | | | AAAGGAGGCCTTCCAGGGGGCAAGGTAATGTAATTAAAC |
| | | | | TTTCTTTTTGTTTTGTTAGATTTTGTGTTTTACTCAATT |
| | | | | TCTTGGTAGTACTTCTTTCCCTACCTAACTCCGACTTCT |
| | | | | CAGATTGACCTTTTTTAAGAGGTGGGGAATAGTGTTTCT |
| | | | | TAAGTGAGGAAAAGAGAAAGCCGGGGTATGAGCTTTAGC |
| | | | | ATGACATCGTATGTATTTGATATTGATACTGCAAATCAA |
| | | | | GTGGGAATCAAGCATAAAATAGCTTCAGAGGGATACATT |
| | | | | TTCTTTTCTTGCATGAAGTTATACAGCATAAATGATCAG |
| | | | | AGGTGTCTGCTGTGTATATGTGTAATAAGACTGTTATAG |
| | | | | TTAGCAGGAATGCAGGAGATAAATTATGAAGATGGTGTT |
| | | | | GATGAATCTTAAAAGACAATTCAGAAACCAAAGTTTGAG |
| | | | | TAGTAAGTGACTTTTGAGAGGTGTACTTCTCTCCCAAAT |
| | | | | GAGCTATAAGCTCTAACAAAAGTCTCAATACTAATCAGA |
| | | | | TGCCTCTCTCACGCTCCATCCCTTTATTTAGATTTCTTG |
| | | | | ATTTCTTTTTTATAACTTTCCCAACTTATTCCCCGCTTT |
| | | | | TCCTTCACGCTACCTTCTAACTGAAATAAAATGCAATTC |
| | | | | TTACCTGGTTTCTTTATGGCTTGTTAATTTTAATAAGGA |
| | | | | TCAAGTATAGTATGAAAGTAATTCTCTTTGGCATTAAGG |
| | | | | CTTTTGCATTGTTGTTTGTCTAAGATCCCAATGGCAAGT |
| | | | | TCACATAAGATATCTGTTGGTATATGTATAAAATAATTA |
| | | | | GTCAGTTGAACAATTTTCTTTTTCTTGGCAAATAAACTC |
| | | | | GTATGATACTTCACCGGGGGAGGGGGGGAGGGGGTTAGA |
| | | | | TTTGGTACGGTAAGTATCCTGTGTATTATTTTTCTTCAG |
| | | | | TTATTTTATTTAGTTGCTTTTTTGGGGTTACTTTTTTCT |
| | | | | CCATCTAGGATCCTGTATGTTAATGTTTCTTCACTTATT |
| | | | | TTATTTAGTTGCTTTTTTGGGGTTACATTTTTTTTCGAG |
| | | | | GGGCTACTGAGTTCATAAGATAAGGGTCTTGTGTATTAA |
| | | | | TATGCTCTTCACTTGGTGCTCGCTATTGGTGTAACTGTA |
| | | | | ATTCAGGTGTCTTCTTCACTCTTAAGATAAGGATGATTT |
| | | | | TATGAGAAATGTTTCCACATGCTTGGCACCAACTTGTTT |
| | | | | ATGTGTAGTAGTAGAAGAAATTATGTATAACATGCATAC |
| | | | | TCAGCATGGCAGTGACTAGTGAATAAGAATTGAAGAAAG |
| | | | | GAGGTAAAGTTGCATGCAAGAAACCTATAAAAAGATGAT |
| | | | | TCATTCAAAACCTTTTGCTATAGCCATGCTTACAAATTG |
| | | | | ATCAAATTAGAACTTCAATTTCAAAGTTTGTTGTTAATG |
| | | | | AGAAGTTAAGCATAGTTGTGATTTTCAATTTCACAGTCA |
| | | | | TGAAGTAAGAAACTCTCTAATATTATCGTTTCCTTTTTG |
| | | | | TAACCTGTTTGCAGGTCAAGCTCTCTGGATCGGTTAGTA |
| | | | | GCCAATATTTAACTGCACTTCTGATGGCTACTCCTTTGG |
| | | | | GTCTTGGAGATGTGGAGATTGAGATAGTTGATAAATTGA |
| | | | | TTTCCGTACCGTATGTTGAAATGACAATAAGGTTGATGG |
| | | | | AACGCTTTGGAGTATCTGTTGAACATAGTGATAGTTGGG |
| | | | | ACAGGTTCTTCATCCGAGGTGGTCAGAAATACAAGTAAG |
| | | | | TCTCTCATCTTACATTACATGTCCTTTTAACGTGTCTCC |
| | | | | ATTAGTAGACTGAAAACGCATGTAAATGCATCAGATCTC |
| | | | | CTGGAAAGGCATATGTTGAGGGTGACGCTTCAAGTGCTA |
| | | | | GCTACTTCCTAGCTGGAGCTGCCGTCACTGGGGGGACTG |
| | | | | TGACTGTCAAGGGTTGTGGAACAAGCAGTTTACAGGTAT |
| | | | | AATGTTAACCCTTACCCTTGACATTGTTCTACTAAATTC |
| | | | | TGGAGGACCCTTTCAATTCTGGGTGGGATAAGCACGACA |
| | | | | ATTTGAC |
| 15 | Amaranthus | Genomic | 2013 | AAATGATGCAAATTAATTGGGATTACATTTTGAAGATTG |
| | rudis | | | ATATTGAAATTGAGAGAGAGTTAAAATGTATGGATGAGA |
| | | | | GGGTTGCAAATCAAATGAGACGGAGGGGGTAGATTAGCA |
| | | | | AAATTAATAAGTTATTTGAAGATTGAATTTGTAAAATAA |
| | | | | TTGATGAATCGGGCATTACATTTTGCTCATCCCATCCTA |
| | | | | CACCAACCCCAAAACAATTCAACAACAAACTCTTTTTAC |
| | | | | TACACCAACCCACTTTCTCTTTGCCCACCAAAACTTTGG |
| | | | | TTTGGTAAGAACTAAGCCCTCTTCTTTCTCTCCCCCTTC |
| | | | | TCCCTCTTAGAAGGCTAAAATCCACCTAACTTTTTCAGC |
| | | | | CAAGAACACAAAGCGAAATTCAGAGATAAAGAGAAACAA |
| | | | | TAATGGCTCAAGCTACTGCCATCAACAATGGTGTCCAAA |
| | | | | CTGGTCAATTGCACCATACTTTACCCAAAACCCACTTAC |
| | | | | CCAAATCTTCAAAAATTGTTAATTTTGGATCAAACTTGA |
| | | | | GAATTTCTCCAAAGTTCATGTCTTTAACCATTAAAAGAG |
| | | | | TTGGTGGGCAATCATCAATTATTCCCAAGATTCAAGCTT |
| | | | | CAGTTGCTGCTGCAGCTGAGAAGCCTTCATCTGTCCCAG |
| | | | | AAATTGTGTTACAACCCATCAAAGAGATCTCTGGTACCA |
| | | | | TTCAATTGCCTGGGTCAAAGTCTCTATCTAATCGAATCC |
| | | | | TTCTTTTAGCTGCTTTGTCTGAGGTATTTATTTCTCAAC |
| | | | | TGCTAAAACTTTCCAATCTCTATTTGATATTGGAATTTG |
| | | | | TATTACATATTCCATCTTGTTGTAATTGCATTAGTAGAA |
| | | | | AGTTATGTTTTGACCTTTGTTCATTTATTTGTTGAATTA |
| | | | | GTATTGTTGAGAATTTGAATGTAATTATTTTTTTTCCAA |
| | | | | TGTGAATTTAATCTGATTAAATCCACCTCTTATTTATGT |
| | | | | TAAGTTGCAATGAGGTTTGCCAAACGGTTATCATTGAAG |
| | | | | GATAAGTTTGCGTACTTCTGACCCTCCCAACTTCGCGTT |
| | | | | GGTAGAGCCATTTAATGTTATTGGGGGTGATTAAAAAGA |
| | | | | TGTATTTGTTTTGCCATTTGAAATAGTAGCGTTCGTGAT |
| | | | | TCTGTTTTGGGTGTCTTTATAGATATGATATATGGGTTA |
| | | | | TTCATGTAATGTGAAGGTTTATGTAATATCTTGGATGCA |
| | | | | TGTCTGGTGTTGTTTGTTGTAAATGGTTGAATGTTGTTA |
| | | | | TTTGGATACATTTTTTCATCCATTTTTTTTTCCCTTTTT |
| | | | | ACTTGGAACTGGAAGAGGGAGGGTTATTGGGAGTAATTG |
| | | | | AAAGGTTGTGAGTTTGAGACAGTGCATCCAAGACGAAGA |
| | | | | ACTTGAGATAGATGTTGAAGGCTAAACCTTATCACTGCT |
| | | | | TGAATTCATTATATATCTGAAAATTTTACTATATGCATC |
| | | | | CGTTTTGCTAATAAAGTGTTTTTGGACTATCATGTTTTG |
| | | | | TGATGCCCAAGAGGGTGATATTACTGTGATAAATGGAAA |
| | | | | TATCATAATAACATCTATTGTTAAGTAGTTTTAGAGGCT |
| | | | | TTTGATTGGTGCTTCGGCTTTGGTTTTACTTACCTCCTA |
| | | | | GAGAAGATTGATTCTGGTTGTGCAATCTGAACATTATTT |
| | | | | CATCATGGTATGAATATGGTTCAAAAACAAGGCTGCATC |
| | | | | GCATTGGACACGTTGTGAAGATTTAAAAAAATCGAATTG |
| | | | | ATATTTCTAGCATTGTAAAGGCTTAAATAAACTGTATTC |
| | | | | CAGGCTATATTAGGGATCTCTCATGCTTTTGACCGATAT |
| | | | | TAAGGTGTTACGATAACCGCATCACTCCTGCAATCGTGA |
| | | | | CCGCATGTTTTCACTCTATTATGTGTTACAAGAGATTAG |
| | | | | TGTTACATGAAGTGGATCCCCTGTGATTTTGTTCTAGGT |
| | | | | GGACAGTGTTTTTGCCGAATTTTATGGCAGGATTTATAA |
| | | | | AGAGATTGGATATTAGGGATTTGAATTTTTTAAAATGTT |
| | | | | TCCCGTACTCCTATGGTTTTCTACACACAGTTTACCGAC |
| | | | | TGTTTATTTGAATTTTTTGTTTGA |
| 16 | Amaranthus | Genomic | 1530 | CTGTTTATTTGAATTTTTTGTTTGAGAAAAGGCTTACAG |
| | rudis | | | GCTTGCATATGTATATATGTATATTTATGTATTTGCTTT |
| | | | | GTGGTCAAATGTGCTGCATGTTGTAATGAAAACTCTGCC |
| | | | | CGGGGATGGCAGGCTTACATGCCAAAGAAAAAGATTGTG |
| | | | | TTCCAAAACAGAAAATATCCCATCGGCATCAGCCTGCAA |
| | | | | TTTTTTTGGGAATGGTATTAAATCTTGGAAATCTTCTCA |
| | | | | ATTTGTTCAAACCATGAGGATTTTTCCGTAATCCAATAA |
| | | | | TTAGCGCGTTGTTTCATTTGTAAAAATTACAATTTTTAA |
| | | | | TCATATTTCTCTTTAGTGAAGCAACTGATTGGAAAACTT |
| | | | | TGGTATCTGTCATGTTTCTTTCCAAGTTAAAGTGTTCCC |
| | | | | ATGCATCATCTTCAAAAATCTTTCATAATGTTTTTGTAC |
| | | | | AATATTTTCGATAGGAAGTTCATTCATGCCAAGGGTTAA |
| | | | | CAATATGTCACTTGTGAATTTCTAAAATAGCAGAAAACA |
| | | | | TATTGTGACCTGTAGAGTTCATCCCAAGGTATCCTCTGT |
| | | | | GCGAGGGATGAAAAAAGCCTCTGGTAATTTATGCTACTA |
| | | | | TCCCAAGATAGTATTATTAGAAGTCATTTATAGCCGCGT |
| | | | | AAGAGAGCCAAGGATCATTGTAGGCTTGTTCTATTTCCA |
| | | | | TATCTTAATGTAGCACCCAAGTATTCCTCAGCAATATGA |
| | | | | GTATTTTAAAGTCTTTCAAGTCATACATTATCTCTTGGC |
| | | | | AATGAGTCGTTTCTGGATTTTGAATGCTGCCAGTCCACT |
| | | | | AACTTACTGTAATGCAATACGTCATTATTCAGCTAGTTT |
| | | | | CTTATTGGAAAAAAACCATAAAAATGGGAAAAGTTTGAG |
| | | | | GTATATTTCTGTAATCCAACTTGAGGATTAGCTTTATCA |
| | | | | CATAAAAGCTACATTGCAAGATCTATTATTAGTTTGAAT |
| | | | | TTGCATCTTAAGTCTTGTTTTTCCTTAGTGATTTTTTCT |
| | | | | TTAACTTGTTATTCGTTTCCTGAAGTTTCCAGTGTCATA |
| | | | | ACTCCTAACCACAATCATGCTACAGGGCACAACAGTGGT |
| | | | | CGACAACTTGCTGTATAGTGATGATATTCTTTATATGTT |
| | | | | GGACGCTCTCAGAACTCTTGGTTTAAAAGTGGATGATGA |
| | | | | TAATACAGACAAAAGGGCAGTCGTGGAGGGTTGTGGTGG |
| | | | | TCTGTTTCCTGTTGGTAAAGATGGAAAGGAAGAGATTCA |
| | | | | ACTTTTCCTTGGAAATGCAGGAACAGCGATGCGCCCATT |
| | | | | GACAGCTGCGGTTGCCGTTGCTGGAGGAAATTCAAGGTT |
| | | | | TGTCCAATTATATATTTTATGCGAGTGTGATTTTTGTAA |
| | | | | TATTACTTTTTTTGTGTTAGTTTCAATCATGAAGCTGCT |
| | | | | TATGCAGAAGCCGTACCCCTGAAATTTTCTTATTTTGTA |
| | | | | TATATCAGTTGGTAATTGATGTAAGAGATTTTTCCGAGA |
| | | | | GGAATAAAAATCAGGGGGGGCGAGTACCTATAAACTGTA |
| | | | | ACCTCAAGAATATTAAACTATTGTTCTATCACATTAACT |
| | | | | TTTGATCAA |
| 17 | Amaranthus | Genomic | 1145 | TTCTCATTACCACCGTTTATTACAATCTACCAAACGGGC |
| | rudis | | | CGTTAAGGTTTTCTTAACTAGGGGTGTTTAGTTTGGAGG |
| | | | | AAAGCTTTTTATTGGAAAACTGTTTTCTCCATATTCCTA |
| | | | | TAATGACTTGACTGGATTTAGATTGGAAAATTAGGGTTG |
| | | | | AAAACAATTTTTCCTTCCATTATAAGCTTATAATTTTAT |
| | | | | AGTTAGATGAAAATCAAATTTCATTCACTTTCACTCCAT |
| | | | | CTCCCTTGTTAGCATTATCGTTTTCCATTAAACAAAACA |
| | | | | AAAGAAAAGTACTAATCATTAACGTTTACCTGGAAAATT |
| | | | | ATTTCTAATGGTAATGTTCTCCGTCAGACCAAACACCTT |
| | | | | CGGAATGAGGAAGCATTATGGATTAAAGAACCTTGTGCT |
| | | | | TGGATTATTTTATTTGTCTATAAGATGCTTGTCTAGAGT |
| | | | | GTGCTTGTATGTTTATTAACTTATCACGCCTCCTTTGCT |
| | | | | ATCGAAGAAATATATATAAAAAAAAGAATTATTTCACCT |
| | | | | GTAAGCGTACCCCAAATATCGACGCAAAATGCATGTCAC |
| | | | | ATATGTGTAATGAATATGTTATGTGAATAAACAGTGGCT |
| | | | | AGCTGGAGAGTGAAGGAAACCGAACGGATGATTGCCATT |
| | | | | TGCACAGAACTGAGAAAGGTTAGCAGTCTTTTACATTCT |
| | | | | TGAAGGTTGTAAATAGTTCTTGAGTAAAATATATTCAAT |
| | | | | GTATAACTGATGTTCATTTGCATTCCTATCAATACTTCC |
| | | | | AGCTTGGGGCAACAGTTGAGGAAGGATCTGATTACTGTG |
| | | | | TGATCACTCCGCCTGAAAAGCTGATACCCACCGCCATCG |
| | | | | AAACTTATGACGATCACCGAATGGCCATGGCATTCTCTC |
| | | | | TTGCTGCCTGTGCTGATGTTCCCGTCACTATCCTTGATC |
| | | | | CGGGATGTACACGTAAAACCTTCCCGGACTACTTTGATG |
| | | | | TCTTAGAAAAGTTCGCCAAGCATTGAGTAGCCTATACGA |
| | | | | GATCTATAAATTGTACGCCGAAGGTTTTGATTTGAGACT |
| | | | | AATAGTAGATAAAAGGCTATTAAACTGGCTTTCTGCTCG |
| | | | | AGTAATTATGAAATTCTTTGTATTATGTTTGTAAGATTT |
| | | | | TAAGTAGCTTATAAATTACAATGTACTAAAGTCTAGAAA |
| | | | | TAAGTTATGTATGG |
| 18 | Amaranthus | Genomic | 703 | TCAAGTCAGTGGTCGGTAATGAAACGAATAATAAATGCT |
| | rudis | | | AGAGAGAGAGAAAGTATGTGTACCGTAAATGGCATTGAG |
| | | | | TGCGGGTATTTATAGAACAATAAATGACCTGGTTGGTTG |
| | | | | TCCTAGGGGTATTTTAGTAATTTCACCCGTAGGTGGGTT |
| | | | | GAGTCAAGACGTTGACTGGGCTGATTGGGCCCTTTGACT |
| | | | | TAGCCCATAAATTTGGGGCTAGTTGACCCAATTACAATA |
| | | | | ATGATATTTATAATATATAAAGTCCGTCTCTGTTATTTT |
| | | | | CCAAACATCGAATAAAGTCAGCATCGACTCTCCATAAAA |
| | | | | AGGATCCATTTCTTTTAGTTTGTCTAATTGGGCTCATAA |
| | | | | AATACAAGGAACCCCTTTATATTTAGTAATTGATTGTGT |
| | | | | TAAAGAAATGCACCTCAAGAAAATGTTTAACTTGATAGT |
| | | | | TTGAGTCCTAATTTATTTTAGATATATTTTGCGGCTATT |
| | | | | CTTTACATACATGAATTTGTTACGATAAAGTGTGGAGGC |
| | | | | AATATACATCCTATTTATAAATGATTAAAATTAATCTCG |
| | | | | GCCAAGATTAGGTATAGTCTCGCTCACGACTAATCCCAA |
| | | | | TTCTTCATACAAACTTATGCCTTCTACGGAGTTTCACAA |
| | | | | ATTCTTGTAAGAGACGGTCTCTTTGAAAGATCATNTCTA |
| | | | | ATTGAACTGACCCATTAAAAAAAATATAGAGTAAAGTAG |
| | | | | A |
| 19 | Amaranthus | Genomic | 231 | GACGGTGTCTCAGGAGACTAGCTGGCGGAGTTTAGCATC |
| | rudis | | | AACCGATATTGGGCATTAGACTCGATCAAGACTTCATAA |
| | | | | CCGAGACTCCGATTCTCTTCAAACCAATCATCTTATTTC |
| | | | | AACCCATGTTAGTTTAAGTCATCAAATATCAACCGAATA |
| | | | | AGTTTAGCTAATAAAAAGAAACGGAAGATAATATAATGC |
| | | | | ATTATTGGAAGACAGAAATATACTTCCTCCGTTCCA |
| 20 | Amaranthus | Genomic | 208 | TAAGCTTGAACGATGAATAGTGTCAGTAACGAAAATGTA |
| | rudis | | | GCAACTATTTCAGAACGGAGGAAGTAATTTGAAACAAAG |
| | | | | AGAAAATTATTGTTCTTCAAGAAAAAGGTAGATAATAGT |
| | | | | AATAAATGAAAAGAGAGAATGAATTGTATGGTTGAAATT |
| | | | | GAGAGAGAGTTAAAATGTATGGATGAGATTTAAAGGAAG |
| | | | | TGGTGGGCCATAG |
| 21 | Amaranthus | Genomic | 94 | AATCCAATACGTTATTTTAATCATTTATATATTGATTTA |
| | rudis | | | TACACGTCTAAAAATTATAAAAAAATTAAAATAATGAAA |
| | | | | ATATGCGATTAGACGA |
| 22 | Amaranthus | Genomic | 40 | ACTTGACTATATTTTGTCTTACACATTAGCCGCAATATA |
| | rudis | | | T |
| 23 | Amaranthus | Genomic | 3681 | AAAGATGGAAAGGAAGAGATTCAACTTTTCCTTGGAAAT |
| | rudis | | | GCAGGAACAGCGATGCGCCCATTGACAGCTGCGGTTGCC |
| | | | | GTTGCTGGAGGAAATTCAAGGTTTGTCCAATTATATATT |
| | | | | TTATGCGAGTGTGATTTTTGTAATATTACTTTTTTTTTT |
| | | | | GTGCTAGTTTCAATCATGAAGCTGCTAATGCAGAAGTGT |
| | | | | TGTAACCTCGCGAATATTAAACTATTGTGCTATCACATT |
| | | | | AACTTTTGATCAAAGATGTACACTGTGTTTGTATAGTTT |
| | | | | ATAGAGCTAAAGGGATGGAAGGGGTCGGGAGAGAAGAAG |
| | | | | AGGAGAAAAGAAGAAGATCCTCCATATGTATACCAAGTG |
| | | | | TTTGAACGGAAGGAAGAAGGAGGAAACTCTACACAATAT |
| | | | | GGAGATGAAGTTTTTGGATAGAAGCCGCTTGAGAATGAG |
| | | | | AGTTAATTCATGTGAAAGTCTATGAGAATGAGTTCACCT |
| | | | | GCTTAATAATTTTAAGCTCTCAACTTCTCATCCTCTTTT |
| | | | | CTTTGTCAAAAATATCATGTCTTCATGTGATAATTGCTT |
| | | | | ACATAATCGATTATTTTGTAAAGCGGTTGTCTCTCTAAA |
| | | | | TCTCTCCACTTACGAAAATAATTCTTCCTTGAAGGTTGA |
| | | | | AGAAATCCCTTCATTTCCTTTTCCTCTATTTCTCCACCC |
| | | | | TTCCTACTTTGGTGTAGCATTTAGTATCCCTCCATTTCC |
| | | | | ATGGCCTATAGTGTTAGATATATTCAAACTTAAGCATCT |
| | | | | CATGTTTTATGTGGGTTCTAATTGTTATTTATATATGCA |
| | | | | TTTCCAAGGATTCAAGGTAATTCGAACCAATCAAGCCCA |
| | | | | AAACAGGATATGAATTCTTCAACCTAGTCTGAACTTGTA |
| | | | | CATCTGAAACATACTAGTTGTAATTGAAATATACTCAAC |
| | | | | TGTAATAGGACTCTCACCTTCATTGTAGGTTGCCACATA |
| | | | | GCACGTATTGTCGATCCACCCATCCTTATTATTTGACAC |
| | | | | ATCAAATAAAGGATCCACTCACGTGGAACTCCTACCCTA |
| | | | | CAAAATAAACCATCTTCCTCATCTCATTTGTATTCACGT |
| | | | | AGTTGCTTCCTCAATCCTACAAGTAAAAGGAGAATTGTG |
| | | | | ATTCAACTTTTGGAGTTTGGACCTATTTTACTGTCAATC |
| | | | | AACGAATATTAGGACAATCACATTGGTCGCTTGGCGCTT |
| | | | | GAAACATTTGATTTCCTCAAAATCCTTTGCTTCCCCCAA |
| | | | | CTTTTCATCCTTTTCTTTCCACATTAAAGTAGGTGCCCG |
| | | | | AACCTCCATAGCCACAAACTTGGTTGTAGACGACATGCC |
| | | | | AACCTTTCTACCTTTAATAAAGATAGGATTTGTAAAAGC |
| | | | | CTTGCTCTTCTTAGATCCTTATCTTTCATAGACCATTGT |
| | | | | CATCTTGTACATATCATCAAAAGACAAGTTGGTATGTAA |
| | | | | CTCAGGCTTCTCGCACAAATTAACATCCTTCTCACCAAT |
| | | | | GAACCTCCCTAGTAGAAATGCCTCTCGTACCTCAATATG |
| | | | | ACAAGCCCTACCTCTCAAACTTCCACAAAGCTATAGATC |
| | | | | TTCCATCCTGATGCAAGGAACTTCAACGCACATGTAAAT |
| | | | | GTGGTTTGAATTTTAATGTTCAAAGGAAAAAACCTTTGT |
| | | | | TTCATGTGCATCTTTATGTCAGCATAGCTATTAATCAGC |
| | | | | TTCTTTTCTCTTGCACTAGCTATACTCTATACATTTAAG |
| | | | | CCAACAAGAAGCTTGCTTCTTGAGCTCAAGTTTAACAAA |
| | | | | CTTGAAAATTCAATTTTTGGGTGGAGTTCTTGTCGTAAA |
| | | | | AACACTCCAAACTTCTCTCCTATTCAAGATAATCTTTTG |
| | | | | GGTGTAAGGACATACTATCTAAATTTTCTACGTCATCTT |
| | | | | GAAGCCATGGTCATCCACCTAGCAATCTGCTCAACTCTC |
| | | | | GGTTCATGTTTATTCAACATCTGTGTGAATAGATTGATC |
| | | | | AAGCTTGCCATCTGCTCAAGGATAGTTGAGTTATTCTCT |
| | | | | TGTAATACTGGATTCCTCTCTTATGTTTTTTTAGTCATC |
| | | | | CTACTATTTGCTAGCAACAAACAATCTTACAAGAATATA |
| | | | | AGAGGGGATTCTCTTGTATTATAAGGCACTACTCAGAAC |
| | | | | CTAAGGAAGTAGTATGGGTGTCTTATTTTTGTCCTTGCC |
| | | | | TCGTAGGACATAAAAGAGAGTTGTATTTGTGAATGATTC |
| | | | | AACATAAACCAAAAGTATGTAGGCTCTTAGGTTATACCA |
| | | | | TCTCATTAATATATGATGAAATCTTACGTATATTCCTTC |
| | | | | ACATATATTTGTTTCTTTGGGGTCATTTATTGTAGCAGG |
| | | | | TCATTGATATGGAATGCCTTAGTTATGGCATTATTGTAC |
| | | | | GTGCACTGTCTCAGGAGAATAGATGGACTGTTTATGCTT |
| | | | | TTTCGCTATTTGATGGTAATACAAAGATTGCAATATTTG |
| | | | | CAAGACCTTGCTGTTCGGATATAGAGCAAAATCTATTAC |
| | | | | CTCGATGCCATTAATTTTGAAGGGATCGAATGTATCCTT |
| | | | | ATCCTTATTCATGATAACAAAGAGATTGCTTTGAAGTCC |
| | | | | TTACGTTTGAAAATCCTGGACTTCACTGAATTAATGTAA |
| | | | | ATTTCAGGTTTTCTGTTGCGTGCCATGAAATGGAATACT |
| | | | | TTATTGCTTATGTGCTGGGAATAAGTAAGCTTAAGAAGG |
| | | | | CAGTTTCCCAACTCCTATTAATGGCACCTACACTTTATA |
| | | | | TTATCCTTTCTGATGTAGTTTTTCTTTTCCTTGCATGTG |
| | | | | TTGATTTAGCTATGTTCTTGACGGAGTACCAAGAATGAG |
| | | | | GGAGCGCCCCATTGGGGATTTGGTAGCAGGTTTGAAGCA |
| | | | | ACTTGGTTCAGATGTTGACTGTTTTCTTGGCACAAATTG |
| | | | | CCCTCCTGTTCGGGTCAATGCTAAAGGAGGCCTACCAGG |
| | | | | GGGCAAGGTACTGTAATTATATTTTCTTTTTGTTAAGTT |
| | | | | AGATTTTGTGTTTTACTCCATCTAATTCGATGAATGATG |
| | | | | ATTCATACGTCAATTTCTTGGTAGTACTTCCTTTCCCTA |
| | | | | CCTAACTCTGACTTCTCTGATTGACCTTTTCTGTGACGT |
| | | | | GGGGAATAGAGTTTTTATTAAGTGAGGAAAAGAGAAACC |
| | | | | CGGTGTATGAGCTTTAGCATGACAGAATATGTATTTGAT |
| | | | | ATTTATACTGCAAATTAAGTTGGAATCAAGAATAAAATA |
| | | | | GCTTCAGTTGGAGACAGTTTCTTTTCTTGCATGAAGTTT |
| | | | | ATACAGCATAAATCATCAGAGGTGTCTGCTGTGTATGTG |
| | | | | TAATAGACTGTTATAGTTAGCAGGAATGCAGTAGATAAA |
| | | | | ATGAAGATGGTGTTGATAAAGCTTAACAGACAATTCAAA |
| | | | | AAACAAAGTTTGAGTAGTAAGTAGACTTTTGAAAGGCGT |
| | | | | GTTTCTCTCCCAAATGAGCTATAAGTTCTAACAAAAGTT |
| | | | | TGAATACTTATCAGATGCCTCTCTCACGCTCTATCCCTT |
| | | | | AATTCAGATTTCTTGATTTCTTTTTTATAACTTTCCCAA |
| | | | | CTTATTTCCGCCTTTTTCTTCATGCCACCTTTTAACTGA |
| | | | | AATAAAATGCAATTCCTACCTTGTTTCTTTAAGGCTTGT |
| | | | | ACATTTTATTAAGGACTTAGTATGAAAGTAATTCTCTTT |
| | | | | GCATTAAGGCTTTTGCATTGTTGTTTGTCTAAGATCCCA |
| | | | | ATGGCAAGTCCACTTAAGATATCTGTTGGTATTAGGAAT |
| | | | | GGTCACGTGTCCAGGACCCTGTTGGACCCGCCCCAGACC |
| | | | | CGCCCCTTTTTTAAG |
| 24 | Amaranthus | Genomic | 589 | TGTGTAAAAAACGAAAACCCAGAGAGGTGAAACACCGGA |
| | rudis | | | AGACACCTAACTTTTTCAGCTAAGCACACAAAGCGAAAT |
| | | | | TCAGAGATAAAGAGAAACAATAATGGCTCAAGCTACTGC |
| | | | | CATCAACAATGGTGTCCAAACTGGTCAATTGCACCATAC |
| | | | | TTTACCCAAAACCCACTTACCCAAATCTTCAAAAATTGT |
| | | | | TAATTTTGGATCAAACTTGAGAATTTCTCCAAAGTTCAT |
| | | | | GTCTTTAACCATTAAAAGAGTTGGTGGGCAATCATCAAT |
| | | | | TATTCCCAAGATTCAAGCTTCAGTTGCTGCTGCAGCTGA |
| | | | | GAAGCCTTCATCTGTCCCAGAAATTGTGTTACAACCCAT |
| | | | | CAAAGAGATCTCTGGTACCATTCAATTGCCTGGGTCAAA |
| | | | | GTCTCTATCTAATCGAATCCTTCTTTTAGCTGCTTTGTC |
| | | | | TGAGGTATTTATTTCTCAACTACTAAAACTTTCCAATCT |
| | | | | CTATTTGATATTGGAATTTATATTATAGCTGCTTTGGAA |
| | | | | TTTATAAAAACAGGTATGAGTATTAAATTAAATTATCAA |
| | | | | GTTGAAGAAAGAGGATTTTTGAGGGGTTTTAATGGTGGT |
| | | | | GGTG |
| 25 | Amaranthus | Genomic | 479 | GAAACTTATGACGATCACCGAATGGCCATGGCATTCTCT |
| | rudis | | | CTTGCTGCCTGTGCTGATGTTCCCGTCACTATCCTTGAT |
| | | | | CCGGGATGTACACGTAAAACCTTCCCGGACTACTTTGAT |
| | | | | GTCTTAGAAAAGTTCGCCAAGCATTGAGTAGCCTATACG |
| | | | | AGATCTATAAATTGTACGCCGAAGGTTTTGATTTGAGAC |
| | | | | TAATAGTAGATAAAAGGCTATTAAACTGGCTTTCTGCTC |
| | | | | GAGTAATTATGAAATTCTTTGTATTATGTTTGTAAGATT |
| | | | | TTAAGTAGCTTATAAATTACAATGTACTAAAGTCTAGAA |
| | | | | ATAAGTTATGTATGGGTTATGAATTATGATGCTGAAATC |
| | | | | AATGAGAAATGCATACTTGAAAGGCTTGACCTTGAATTT |
| | | | | GTGACCTAAAGAGTGGTAACTTTGGAGTTTCCAAGTCAT |
| | | | | GTTGTTTATCTTAGTTTTTTTATATTGTTTATTCAAACT |
| | | | | GTTTATTTTCA |
| 26 | Amaranthus | Genomic | 473 | CTCTAATATTATCGTTTCCTTTTTGTAACCTGTTTGCAG |
| | rudis | | | GTCAAGCTCTCTGGATCGGTTAGTAGCCAATATTTAACT |
| | | | | GCACTTCTGATGGCTACTCCTTTGGGTCTTGGAGATGTG |
| | | | | GAGATTGAGATAGTTGATAAATTGATTTCCGTACCGTAT |
| | | | | GTTGAAATGACAATAAGGTTGATGGAACGCTTTGGAGTA |
| | | | | TCTGTTGAACATAGTGATAGTTGGGACAGGTTCTTCATC |
| | | | | CGAGGTGGTCAGAAATACAAGTAAGTCTCTCATCTTATA |
| | | | | TTACATGTCCTTTTAACGTGTCTCCATTAGTAGACTGAA |
| | | | | AACGCATGTAAATGCATCAGATCTCCTGGAAAGGCATAT |
| | | | | GTTGAGGGTGACGCTTCAAGTGCTAGCTACTTCCTAGCT |
| | | | | GGAGCTGCCGTCACTGGGGGGACTGTGACTGTCAAGGGT |
| | | | | TGTGGAACAAGCAGTTTACAGGTATAATGTTAACCCTTA |
| | | | | CCCTT |
| 27 | Amaranthus | Genomic | 417 | TCATATTGAGTTTTGGCGCCAACATAGACCTAATCAAAT |
| | rudis | | | AATGAAAAATACAAACAACATCATATGGTTTCTTTTGTC |
| | | | | TTTATGACTAGACACTCTTTATTATTCCTTGATTGGGAT |
| | | | | CTTATTTTGAATGGTTGTTTAGCCTACACCTCATGTTCA |
| | | | | GATTTTGTTCGTATACCAGACTTTTCTTGATTGCGATCT |
| | | | | TATTTGTCCCCTGGATTTTGCATAGGGTGATGTAAAATT |
| | | | | TGCCGAAGTTCTTGAGAAGATGGGTTGCACGGTCACCTG |
| | | | | GACAGAGAATAGCGTAACTGTTACTGGACCACCCAGGGA |
| | | | | ATCATCTGGAAGGAAACATTTGCGCGCTATCGACGTCAA |
| | | | | CATGAATAAAATGCCAGATGTTGCTATGACTCTTGCAGT |
| | | | | TGTTGCCTTGTATGCAGATGGGCCCAC |
| 28 | Amaranthus | Genomic | 224 | TTATCACGCCTCCTTTGCTATCGAAGAAATATATATAAA |
| | rudis | | | AAAAAGAATTATTTCACCTGTAAGCGTACCCCAAATATC |
| | | | | GACGCAAAATGCATGTCACATATGTGTAATGATTTTTTG |
| | | | | TGTGAATAAACAGTGGCTAGCTGGAGAGTGAAGGAAACC |
| | | | | GAACGGATGATTGCCATTTGCACAGAACTGAGAAAGGTT |
| | | | | AGCAGCCTTTTACATTCTTGAAGGTTGTA |
| 29 | Amaranthus | cDNA | 2086 | ACCACCATCACCATTAAAACCCCTCAAAAATCCTCTTTC |
| | rudis | | | TTCAACTTGATAATTTAATTTAATACTCATACCTGTTTT |
| | | | | TATAACCCGTAAATCCAGTGTAAAGCTTTGTTAAATTCA |
| | | | | AGCAAAATTGCCAATACACTATGAAACTCTCGAAGATAA |
| | | | | CTGTGTAAAACGAAACCCAGAGGTGAAACACCGGAAGAC |
| | | | | ACCAACTTTTTCAGCCAAGCAAACAAAGCAAATTCAAAA |
| | | | | AAGAGAAAGAATAATGGCTCAAGCTACTACCATCAACAA |
| | | | | TGGTGTCCAAACTGGTCAATTGCACCATATTTTACCCAA |
| | | | | AACCCACTTACCCAAATCTTCAAAAACTCTTAATTTTGG |
| | | | | ATCAAACTTGAGAATTTCTCCAAAGTTCATGTCTTTGAC |
| | | | | CAATAAAAGAGTTGGTGGGCAATCATCAATTGTTCCCAA |
| | | | | GATTCAAGCTTCTGTTGCTGCTGCAGCTGAGAAGCCTTC |
| | | | | ATCTGTCCCAGAAATTGTTTTACAACCCATCAAAGAGAT |
| | | | | CTCTGGTACTGTTCAATTGCCTGGGTCAAAGTCTTTATC |
| | | | | CAATCGAATCCTTCTTTTAGCTGCTTTGTCTGAGGGCAC |
| | | | | AACAGTGGTCGACAACTTGCTGTATAGTGATGATATTCT |
| | | | | TTATATGTTGGACGCTCTCAGAACTCTTGGTTTAAAAGT |
| | | | | GGAGGATGATAATACAGCCAAAAGGGCAGTCGTGGAGGG |
| | | | | TTGTGGTGGTCTGTTTCCTGTTGGTAAAGATGGAAAGGA |
| | | | | AGAGATTCAACTTTTCCTTGGTAATGCAGGAACAGCGAT |
| | | | | GCGCCCATTGACAGCTGCGGTTGCCGTTGCTGGAGGAAA |
| | | | | TTCTAGTTATGTGCTTGATGGAGTGCCAAGAATGAGGGA |
| | | | | GCGCCCCATTGGGGATCTGGTAGCAGGTCTAAAGCAACT |
| | | | | TGGTTCAGATGTTGACTGTTTTCTTGGCACAAATTGCCC |
| | | | | TCCTGTTCGGGTTAATGCTAAAGGAGGCCTTCCAGGGGG |
| | | | | CAAGGTCAAGCTCTCTGGATCGGTTAGTAGCCAATATTT |
| | | | | AACTGCACTTCTCATGGCTACTCCTTTGGGTCTTGGAGA |
| | | | | CGTGGAGATTGAGATAGTTGATAAATTGATTTCTGTACC |
| | | | | GTATGTTGAAATGACAATAAGGTTGATGGAACGCTTTGG |
| | | | | AGTATCTGTAGAACATAGTGATAGTTGGGACAGGTTCTA |
| | | | | CATACGAGGTGGTCAAAAATACAAATCTCCTGGAAAGGC |
| | | | | ATATGTTGAGGGTGACGCTTCAAGTGCTAGCTACTTCCT |
| | | | | AGCTGGAGCCGCCGTCACTGGTGGGACTGTGACTGTCAA |
| | | | | GGGTTGTGGAACAAGCAGTTTACAGGGTGATGTAAAATT |
| | | | | TGCCGAAGTTCTTGAGAAGATGGGCTGCAAGGTCACCTG |
| | | | | GACAGAGAATAGCGTAACTGTTACGGGACCACCCAGGGA |
| | | | | TTCATCTGGAAGGAAACATCTGCGCGCTGTCGACGTCAA |
| | | | | CATGAACAAAATGCCAGATGTTGCTATGACTCTTGCAGT |
| | | | | AGTTGCCTTGTATGCTGATGGGCCCACTGCCATCAGAGA |
| | | | | TGTGGCTAGCTGGAGAGTGAAGGAAACCGAACGGATGAT |
| | | | | TGCCATTTGCACAGAACTGAGAAAGCTTGGGGCAACAGT |
| | | | | TGAGGAAGGATCTGATTACTGTGTGATCACTCCGCCTGA |
| | | | | AAAGCTAAATCCCACCGCCATCGAAACTTATGACGATCA |
| | | | | CCGAATGGCCATGGCATTCTCTCTTGCTGCCTGTGCAGA |
| | | | | TGTTCCCGTCACTATCCTTGATCCGGGATGCACCCGTAA |
| | | | | AACCTTCCCGGACTACTTTGAAGTTTTAGAAAAGTTCGC |
| | | | | CAAGCATTGAGTAACATATGGGTTCTTTAAATTGTACGC |
| | | | | CAAAGGTTTTGATTTGAGACTAATAGTAGATAAAAGGCT |
| | | | | ATAAACTGGCTTTATGCTTGAGTAATTATGAAATTCTTT |
| | | | | GTATTATGTTTGTAAGATTTTAAGTAGCTTATAAATTAC |
| | | | | AATGTACTAAAGTCTAGAAATAAGTTATGTATGGGTTAT |
| | | | | GAATTATGATGCTGAAATCAATGAGAAATGCATACTTGA |
| | | | | AAGGCGAAAAAAAAAAGAAAAAAAAACAAAACATGTCGG |
| | | | | CCGCCTCGGTCTCTACTGA |
| 30 | Amaranthus | cDNA | 1960 | CTTTGGTTTGGTAAGAACTTAGCCCTCTTCTTTCTCTCC |
| | rudis | | | TCTCTCTCTCTCAGAAGGCTAAAATCCACCTAACTTTTT |
| | | | | CAGCCAAGAAACAAAGCGAAATTCAGAGGTAAAGAGAAA |
| | | | | GAATAATGGCTCAAGCTACTACCATCAACAATGGTGTCC |
| | | | | AAACTGGTCAATTGCACCATACTTTACCCAAAACCCACT |
| | | | | TACCCAAATCTTCAAAAACTGTTAATTTTGGATCAAACT |
| | | | | TTAGAATTTCTCCAAAGTTCATGTCTTTAACCAATAAAA |
| | | | | GAGTTGGTGGGCAATCATCAATTATTCCCAAGATTCAAG |
| | | | | CTTCAGTTGCTGCTGCAGCTGAGAAACCTTCATCTGTCC |
| | | | | CAGAAATTGTGTTACAACCCATCAAAGAGATCTCTGGTA |
| | | | | CCATTCAATTGCCTGGGTCAAAGTCTCTATCTAATCGAA |
| | | | | TCCTTCTTTTAGCTGCTTTGTCTCAGGGCACAACTGTGG |
| | | | | TCGACAACTTGCTGTATAGTGATGATATTCTTTATATGT |
| | | | | TGGACGCTCTCAGAACTCTTGGTTTAAAAGTGGAGGATG |
| | | | | ATAATACAGACAAAAGGGCAGTCGTGGAGGGTTGTGGTG |
| | | | | GTCTGTTTCCTGTTGGTAAAGATGGAAAGGAAGAGATTC |
| | | | | AACTTTTCCTTGGAAATGCAGGAACAGCGATGCGCCCAT |
| | | | | TGACAGCTGCGGTTGCCGTTGCTGGAGGAAATTCAAGCT |
| | | | | ATGTTCTTGACGGAGTACCAAGAATGAGGGAGCGCCCCA |
| | | | | TTGGGGATCTGGTAGCAGGTCTAAAGCAACTTGGTTCAG |
| | | | | ATGTTGACTGTTTTCTTGGCACAAATTGCCCTCCTGTTC |
| | | | | GGGTCAATGCTAAAGGAGGCCTTCCAGGGGGCAAGGTCA |
| | | | | AGCTCTCTGGATCGGTTAGTAGCCAATATTTAACTGCAC |
| | | | | TTCTGATGGCTACTCCTTTGGGTCTTGGAGATGTGGAGA |
| | | | | TTGAGATAGTTGATAAATTGATTTCCGTACCGTATGTTG |
| | | | | AAATGACAATAAGGTTGATGGAACGCTTTGGAGTATCTG |
| | | | | TTGAACATAGTGATAGTTGGGACAGGTTCTTCATCCGAG |
| | | | | GTGGTCAGAAATACAAATCTCCTGGAAAGGCATATGTTG |
| | | | | AGGGTGACGCTTCAAGTGCTAGCTACTTCCTAGCTGGAG |
| | | | | CCGCCGTCACTGGGGGGACTGTGACTGTCAAGGGTTGTG |
| | | | | GAACAAGCAGTTTACAGGGTGATGTAAAATTTGCCGAAG |
| | | | | TTCTTGAGAAGATGGGTTGCAAGGTCACCTGGACAGACA |
| | | | | ATAGCGTAACTGTTACTGGACCACCCAGGGAATCATCTG |
| | | | | GAAGGAAACATTTGCGCGCTATCGACGTCAACATGAATA |
| | | | | AAATGCCAGATGTTGCTATGACTCTTGCAGTTGTTGCCT |
| | | | | TGTATGCAGATGGGCCCACCGCCATTAGAGATGTGGCTA |
| | | | | GCTGGAGAGTGAAGGAAACCGAACGGATGATTGCCATTT |
| | | | | GCACAGAACTGAGAAAGCTTGGGGCAACAGTTGAGGAAG |
| | | | | GATCTGATTACTGTGTGATCACTCCGCCTGAAAAGCTGA |
| | | | | TACCCACCGCCATCGAAACTTATGACGATCACCGAATGG |
| | | | | CCATGGCATTCTCTCTTGCTGCCTGTGCTGATGTTCCCG |
| | | | | TCACTATCCTTGATCCGGGATGTACACGTAAAACCTTCC |
| | | | | CGGACTACTTTGATGTCTTAGAAAAGTTCGCCAAGCATT |
| | | | | GAGTAGCCTATACGAGATCTATAAATTGTACGCCGAAGG |
| | | | | TTTTGATTTGAGACTAATAGTAGATAAAAGGCTATTAAA |
| | | | | CTGGCTTTCTGCTCGAGTAATTATGAAATTCTTTGTATT |
| | | | | ATGTTTGTAAGATTTTAAGTAGCTTATAAATTACAATGT |
| | | | | ACTAAAGTCTAGAAATAAGTTATGTATGGGTTATGAATT |
| | | | | ATGATGCTGAAATCAATGAGAAATGCATACTTGAAAGGC |
| | | | | GAAAAAAAAAAGAAAAAAAAACAAAACATGTCGGCCGCC |
| | | | | TCGGTCTCTA |
| 31 | Amaranthus | cDNA | 939 | CATCAACCTAGAATGCCCATATTTTACATGTTTAGCATT |
| | spinosus | | | AACCCTAGAACATGAAACATAATGTGGGTGTTGAAATGC |
| | | | | TAAATACAATAAAGTATCAAATTGTTTAGCAGGATTATC |
| | | | | ATCACCTAAATTATCAGAACTCTCTAAAGGGTACCCTAA |
| | | | | AGCTTGTTTAACCTCAAATAAATAATCATCAATCCAAAT |
| | | | | TTTATCATTTTGATTAAGCTTTGAAGAGGGTAAACAAGA |
| | | | | ACTTAATAATGGGAATTGTTTAAGGGACATTTGAGGACT |
| | | | | ATTTAAGAATCTTTGAGCTAGTTTTGCATCATCTAATGG |
| | | | | TGGTTTAAGGATGTATTTTCTAGGGGGTGCTTTTTCTTT |
| | | | | GGGGATATTACTTTTTCTTTCAGCTAGTTCTTTTAGGAG |
| | | | | TCTTTGAGGGCTAGTTTTTGGGAGTTCTTGAGGGTCTAT |
| | | | | GGATGAAACAGCAAGAATTTGGTGATAATGGAAAGTGGG |
| | | | | CTGGAGTTTTTTGATGGGAATTTGGAGGGAAAATGATGG |
| | | | | GAAGGATGAAGTAAAGGAAACATCAGTGGTTTTTGAGAT |
| | | | | GGGTTTAAAAGGGGATGAGAGGTCCATTGTAAGAAGAGA |
| | | | | AATGAGAGGAAAAAGATGGAGTTTTGAGGATTGTTATGG |
| | | | | GAGCTTTAATGGCGGATTGGACGGGACGCCATTGAAGTT |
| | | | | GATGGAGAGTGAGAAAATGGAGGGTTTTAGAGGGTTCTA |
| | | | | GTGAAGAATTGTGGAATTGGGAATTGAGGATAAGGTTGA |
| | | | | TGGAACGCTTTGGAGTATCCGTAGAACATAGTGATAGTT |
| | | | | GGGACAGGTTCTACATCCGAGGTGGTCAGAAATACAAAT |
| | | | | CTCCTGGAAAGGCATATGTAGAGGGGGACGCTTCTAGTG |
| | | | | CTAGCTACTTCCTAGCAGGAGCCGCCGTCACTGGTGGGA |
| | | | | CTGTGACTGTCAAGGGTTGTGGAACAAGCAGTTTACAGG |
| | | | | GTG |
| 32 | Amaranthus | cDNA | 381 | TCCTGTTCGGGTCAATGCTAAAGGAGGCCTTCCAGGGGG |
| | spinosus | | | CAAGGTCAAGCTCTCTGGATCGGTTAGTAGCCAATATTT |
| | | | | AACTGCACTTCTCATGGCTACTCCTTTGGGGTCTTGGAG |
| | | | | ACGTGGAGATTGAGATAGTTGATAAATTGATTTCTGTAC |
| | | | | CGTATGTTGAAATGACAATAAGGTTGATGGAACGCTTTG |
| | | | | GAGTATCCGTAGAACATAGTGATAGTTGGGACAGGTTCT |
| | | | | ACATCCGAGGTGGTCAGAAATACAAATCTCCTGGAAAGG |
| | | | | CATATGTAGAGGGGGACGCTTCTAGTGCTAGCTACTTCC |
| | | | | TAGCAGGAGCCGCCGTCACTGGTGGGACTGTGACTGTCA |
| | | | | AGGGTTGTGGAACAAGCAGTTTACAGGGTG |
| 33 | Amaranthus | cDNA | 966 | CAGCGATGCGCCCATTGACAGCTGCGGTTGCCGTTGCTG |
| | thunbergii | | | GAGGAAATTCTAGTTATGTGCTTGATGGAGTGCCAAGAA |
| | | | | TGAGGGAGCGCCCCATTGGGGATCTGGTAGCAGGTCTAA |
| | | | | AGCAACTTGGTTCAGATGTTGACTGTTTTCTTGGCACAA |
| | | | | ATTGCCCTCCTGTTCGGGTTAATGCTAAAGGAGGCCTTC |
| | | | | CAGGGGGCAAGGTCAAGCTCTCTGGATCGGTTAGTAGCC |
| | | | | AATATTTAACTGCACTTCTCATGGCTACTCCTTTGGGTC |
| | | | | TTGGAGACGTGGAGATTGAGATAGTTGATAAATTGATTT |
| | | | | CTGTACCGTATGTTGAAATGACAATAAGGTTGATGGAAC |
| | | | | GCTTTGGAGTATCTGTAGAACATAGTGATAGTTGGGACA |
| | | | | GGTTCTACATACGAGGTGGTCAAAAATACAAATCTCCTG |
| | | | | GAAAGGCATATGTTGAGGGTGACGCTTCAAGTGCTAGCT |
| | | | | ACTTCCTAGCTGGAGCCGCCGTCACTGGTGGGACTGTGA |
| | | | | CTGTCAAGGGTTGTGGAACAAGCAGTTTACAGGGTGATG |
| | | | | TAAAATTTGCCGAAGTTCTTGAGAAGATGGGCTGCAAGG |
| | | | | TCACCTGGACAGAGAATAGCGTAACTGTTACGGGACCAC |
| | | | | CCAGGGATTCATCTGGAAGGAAACATCTGCGCGCTGTCG |
| | | | | ACGTCAACATGAACAAAATGCCAGATGTTGCTATGACTC |
| | | | | TTGCAGTAGTTGCCTTGTATGCTGATGGGCCCACTGCCA |
| | | | | TCAGAGATGTGGCTAGCTGGAGAGTGAAGGAAACCGAAC |
| | | | | GGATGATTGCCATTTGCACAGAACTGAGAAAGCTTGGGG |
| | | | | CAACAGTTGAGGAAGGATCTGATTACTGTGTGATCACTC |
| | | | | CGCCTGAAAAGCTAAATCCCACCGCCATCGAAACTTATG |
| | | | | ACGATCACCGAATGGCCATGGCATTCTCTCTTGCTGCCT |
| | | | | GTGCAGATGTTCCCGTCACTATCCTTGATC |
| 34 | Amaranthus | cDNA | 484 | CACCCAACTTTTTCAGCCAACAAACAACGCCAAATTCAG |
| | thunbergii | | | AGAAAGAATAATGGCTCAAGCTACTACCATCAACAATGG |
| | | | | TGTCCAAACTGGTCAATTGCACCATATTTTACCCAAAAC |
| | | | | CCACTTACCCAAATCTTCAAAAACTCTTAATTTTGGATC |
| | | | | AAACTTGAGAATTTCTCCAAAGTTCATGTCTTTGACCAA |
| | | | | TAAAAGAGTTGGTGGGCAATCATCAATTGTTCCCAAGAT |
| | | | | TCAAGCTTCTGTTGCTGCTGCAGCTGAGAAGCCTTCATC |
| | | | | TGTCCCAGAAATTGTTTTACAACCCATCAAAGAGATCTC |
| | | | | TGGTACTGTTCAATTGCCTGGGTCAAAGTCTTTATCCAA |
| | | | | TCGAATCCTTCTTTTAGCTGCTTTGTCTGAGGGCACAAC |
| | | | | AGTGGTCGACAACTTGCTGTATAGTGATGATATTCTTTA |
| | | | | TATGTTGGACGCTCTCAGAACTCTTGGTTTAAAAGTGGA |
| | | | | GGATGATAATACAGCC |
| 35 | Amaranthus | cDNA | 2329 | CCCAGGAGCATCCAAATGTTTCATTAATAGCCTCTCGGC |
| | viridis | | | CATCACAAGATCCTGGATCTTTTGGCCAAGATACTCCAG |
| | | | | TCGCTCAAAACAGAACCTAGGATGTTCAAACTTGTATTT |
| | | | | CGATGGATGTAGGAAACATAGCTGGAGCCCAAGTCCAAG |
| | | | | CTCGATATTCCTTGCTTCAGTGATCTCTGGAAGTCGATC |
| | | | | ATTCTTTGGCAAAGGATAACCCAATATTTTCATAACTTG |
| | | | | TGGTCTGCAATCAAAATCCCAAATGTTTCCTCTGAACCG |
| | | | | ATGCATGCCTGGAGGCACACAAGCTCTAAAAACCCTCGG |
| | | | | ATGAGCAAAAAGAGCATCCTCGGGAGGCCTATAGGTAGC |
| | | | | TACATCTTGCCAATTGAGTTTTCTGCCTTCAAATTCCAC |
| | | | | AGAAACATAATCAACATCTTCGAGCTGCCTTCTTTTCTT |
| | | | | TGGTTGGCATTCTTCATCTTCTGGATCCATCCCAAACAC |
| | | | | TTCAAATAGTACACGATAAACTTCCGGCATCCCATAACA |
| | | | | CAAGTATATAGCACCAAACAAAGCCCAGAAAACAGACTT |
| | | | | TGAAGCAGGCTCTTTCTCAGGGCGCCTCAATTTATCAAT |
| | | | | ATCATCAAAAGGAAACACCAAATTATGCAGACTAGCAGC |
| | | | | TTTAATCCACTTAGGTAAAAACCTCTTCCCTATCAAAGC |
| | | | | AAACACTCTTTCCCTCATTGGTCCTGGAGACTCCCTTGG |
| | | | | ATATCTCTGCAAGAAAAACTCCGCAAACCCTAATTCGAG |
| | | | | CACGAATTGACCCAAAAACATCAACCTAGAATGCCCATA |
| | | | | TTTTACATGTTTAGCATTAACCCTAGAACATGAAACATA |
| | | | | ATGTGGGTGTTGAAATGCTAAATACAATAAAGTATCAAA |
| | | | | TTGTTTAGCAGGATTATCATCACCTAAATTATCAGAACT |
| | | | | CTCTAAAGGGTACCCTAAAGCTTGTTTAACCTCAAACAA |
| | | | | ATAATCATCAATCCAAATTTTATCATTTTGATTAAGCTT |
| | | | | TGAAGAGGGTAAACAAGAACTCAATAATGGGAATTGTTT |
| | | | | AAGGGACATTTGAGGACTATTTAAGAATCTTTGAGCTAG |
| | | | | TTTTGCGTCATCTAATGGTGGTTTAAGGATATATTTTCT |
| | | | | AGGGGGTGCTTTTTTCTTTGGGGATATTATTTTTTCCTT |
| | | | | TCAGCTAGTTCTTTTAGGAGTCTTTGAGGGCTAGTTTTA |
| | | | | GGGAGTTCTTGAGGGTCTATGGATGAAACAGCTAGAATT |
| | | | | TGGTGATAATGGAAAGTGGGTTGGAGTTTTTTGATGGGA |
| | | | | ATTTGGAGAGAAAATGATGGGAAGGATGAAGTAAAGGAA |
| | | | | ATATCAGTGGTTTTTGAGATGGGTTTAAAAGGGGATGAG |
| | | | | AGGTCCATTGTAAGAAGAGAAATGAGAGGAAAAAAAATG |
| | | | | GAGTTTTGAGGATTGTTATGTGAGCTTTAATGGCGGATT |
| | | | | GGACGGGACGCCATTGAAGTTGATGGAGAGTGAGAAAAT |
| | | | | GGAGGGTTTTTAGAGGGTTCGAGTGAAGAATTGTGGAAT |
| | | | | TGGGAATTAAGGATAAGGTGATGGAACGCTTTGGAGTAT |
| | | | | CTGTAGAACATAGTGATAGTTGGGACAGGTTCTACATAC |
| | | | | GAGGTGGTCAAAAATACAAATCTCCTGGAAAGGCATATG |
| | | | | TTGAGGGTGACGCTTCAAGTGCTAGCTACTTCCTAGCTG |
| | | | | GAGCCGCCGTCACTGGTGGGACTGTGACTGTCAAGGGTT |
| | | | | GTGGAACAAGCAGTTTACAGGGTGATGTAAAATTTGCCG |
| | | | | AAGTTCTTGAGAAGATGGGCTGCAAGGTCACCTGGACAG |
| | | | | AGAATAGCGTAACTGTTACGGGACCACCCAGGGATTCAT |
| | | | | CTGGAAGGAAACATCTGCGCGCTGTCGACGTCAACATGA |
| | | | | ACAAAATGCCAGATGTTGCTATGACTCTTGCAGTAGTTG |
| | | | | CCTTGTATGCTGATGGGCCCACTGCCATCAGAGATGTGG |
| | | | | CTAGCTGGAGAGTGAAGGAAACCGAACGGATGATTGCCA |
| | | | | TTTGCACAGAACTGAGAAAGCTTGGGGCAACAGTTGAGG |
| | | | | AAGGATCTGATTACTGTGTGATCACTCCGCCTGAAAAGC |
| | | | | TAAATCCCACCGCCATCGAAACTTATGATGATCACCGAA |
| | | | | TGGCCATGGCATTCTCTCTTGCTGCCTGTGCAGATGTTC |
| | | | | CCGTCACTATCCTTGATCCGGGATGCACCCGTAAAACCT |
| | | | | TCCCGGACTACTTTGAAGTTTTAGAAAAGTTCGCCAAGC |
| | | | | ATTGAGTAACATATGGGTTCTTTAAATTGTACGCCAAGG |
| | | | | TTTTGATTTGAGACTAATAGTAGATAAAAGGCTATAATT |
| | | | | ATGAAATTCTTTGTATTATGTTTGTAAGATTTAAGTAGC |
| | | | | TTATAAATTACAATGTACTAAAGTCTAG |
| 36 | Amaranthus | cDNA | 1746 | ACCCGAACTTTTTCAGCCAACAAACAACGCTAAATTCAG |
| | viridis | | | AGAAAGAATAATGGCTCAAGCTACTACCATCAACAATGG |
| | | | | TGTCCAAACTGGTCAATTGCACCATATTTTACCCAAAAC |
| | | | | CCACTTACCCAAATCTTCAAAAACTCTTAATTTTGGATC |
| | | | | AAACTTGAGAATTTCTCCAAAGTTCATGTCTTTGACCAA |
| | | | | TAAAAGAGTTGGTGGGCAATCATCAATTGTTCCCAAGAT |
| | | | | TCAAGCTTCTGTTGCTGCTGCAGCTGAGAAGCCTTCATC |
| | | | | TGTCCCAGAAATTGTTTTACAACCCATCAAAGAGATCTC |
| | | | | TGGTACTGTTCAATTGCCTGGGTCAAAGTCTTTATCCAA |
| | | | | TCGAATCCTTCTTTTAGCTGCTTTGTCTGAGGGCACAAC |
| | | | | AGTGGTCGACAACTTGCTGTATAGTGATGATATTCTTTA |
| | | | | TATGTTGGACGCTCTCAGAACTCTTGGTTTAAAAGTGGA |
| | | | | GGATGATAATACAGCCAAAAGGGCAGTCGTGGAGGGTTG |
| | | | | TGGTGGTCTGTTTCCTGTTGGTAAAGATGGAAAGGAAGA |
| | | | | GATTCAACTTTTCCTTGGTAATGCAGGAACAGCGATGCG |
| | | | | CCCATTGACAGCTGCGGTTGCCGTTGCTGGAGGAAATTC |
| | | | | TAGTTATGTGCTTGATGGAGTGCCAAGAATGAGGGAGCG |
| | | | | CCCCATTGGGGATCTGGTAGCAGGTCTAAAGCAACTTGG |
| | | | | TTCAGATGTTGACTGTTTTCTTGGCACAAATTGCCCTCC |
| | | | | TGTTCGGGTTAATGCTAAAGGAGGCCTTCCAGGGGGCAA |
| | | | | GGTCAAGCTCTCTGGATCGGTTAGTAGCCAATATTTAAC |
| | | | | TGCACTTCTCATGGCTACTCCTTTGGGTCTTGGAGACGT |
| | | | | GGAGATTGAGATAGTTGATAAATTGATTTCTGTACCGTA |
| | | | | TGTTGAAATGACAATAAGGTTGATGGAACGCTTTGGAGT |
| | | | | ATCTGTAGAACATAGTGATAGTTGGGACAGGTTCTACAT |
| | | | | ACGAGGTGGTCAAAAATACAAATCTCCTGGAAAGGCATA |
| | | | | TGTTGAGGGTGACGCTTCAAGTGCTAGCTACTTCCTAGC |
| | | | | TGGAGCCGCCGTCACTGGTGGGACTGTGACTGTCAAGGG |
| | | | | TTGTGGAACAAGCAGTTTACAGGGTGATGTAAAATTTGC |
| | | | | CGAAGTTCTTGAGAAGATGGGCTGCAAGGTCACCTGGAC |
| | | | | AGAGAATAGCGTAACTGTTACGGGACCACCCAGGGATTC |
| | | | | ATCTGGAAGGAAACATCTGCGCGCTGTCGACGTCAACAT |
| | | | | GAACAAAATGCCAGATGTTGCTATGACTCTTGCAGTAGT |
| | | | | TGCCTTGTATGCTGATGGGCCCACTGCCATCAGAGATGT |
| | | | | GGCTAGCTGGAGAGTGAAGGAAACCGAACGGATGATTGC |
| | | | | CATTTGCACAGAACTGAGAAAGCTTGGGGCAACAGTTGA |
| | | | | GGAAGGATCTGATTACTGTGTGATCACTCCGCCTGAAAA |
| | | | | GCTAAATCCCACCGCCATCGAAACTTATGATGATCACCG |
| | | | | AATGGCCATGGCATTCTCTCTTGCTGCCTGTGCAGATGT |
| | | | | TCCCGTCACTATCCTTGATCCGGGATGCACCCGTAAAAC |
| | | | | CTTCCCGGACTACTTTGAAGTTTTAGAAAAGTTCGCCAA |
| | | | | GCATTGAGTAACATATGGGTTCTTTAAATTGTACGCCAA |
| | | | | GGTTTTGATTTGAGACTAATAGTAGATAAAAGGCTATAA |
| | | | | TTATGAAATTCTTTGTATTATGTTTGTAAGATTTAAGTA |
| | | | | GCTTATAAATTACAATGTACTAAAGTCTAG |
| 37 | Ambrosia | Genomic | 1340 | GCGTCCAGTCGATGTTAACATGAACAAAATGCCAGATGT |
| | artemisiifolia | | | TGCCATGACTCTTGCAGTCGTTGCCCTTTATGCCGACGG |
| | | | | TCCCACAGCCATTAGGGACGGTATGATTGAGCATTTTAC |
| | | | | GTCTTTTTAATATTTTTTTCTCCCACAATTGGAATTTAC |
| | | | | CACATATCCTTAAAATATAAAAAAATAGTTGTTTTAGAT |
| | | | | TTTATATAAGACAGGTGCGCAGCGATGATCACATAAACC |
| | | | | GACATGTATCCATATATAAAATTGTAGATGCAAAGACTT |
| | | | | CCCCTCGGCTTTGTTAAATAATAGTTCATAATGACATCA |
| | | | | TTTTCTCCCGGTATTTGGCAGTGGCTAGCTGGAGAGTAA |
| | | | | AAGAAACCGAAAGGATGATTGCCATTTGCACAGAACTAA |
| | | | | GAAAGGTACGAGTCAATATAACCATATTACTCTTAAACA |
| | | | | GCTTTCAACCCATTATTGTTTAATGCTAAAAGACGTTTT |
| | | | | TGCATTTGTAACCTTGTTCAGTTGGGAGCAACAGTCGAA |
| | | | | GAAGGACCCGATTATTGTGTGATCACTCCACCAGAGAAG |
| | | | | TTGAACGTGACAGCCATCGACACATATGATGATCACAGA |
| | | | | ATGGCCATGGCATTCTCCCTTGCTGCATGCGCAGACGTT |
| | | | | CCTGTCACTATCAAGGACCCCGGCTGCACCCGTAAGACT |
| | | | | TTCCCAGACTACTTTGAAGTTCTTGAGAGATTCACAAAG |
| | | | | CATTAAACAGAATCTTTATGGCTGAAATGCTCCCTTCAC |
| | | | | CTGTTGTCTTTCTTTACATATAATTGGTCTTTTTTTATG |
| | | | | TTAAGGTTGTAGCTTTCTCTGAGATGGATCTGAGTGTAA |
| | | | | TTTTAAATCTTTTGCAAAAATATGTTAGCAATGTATGTT |
| | | | | TTTTTGATGCATATTAAATGTGCTATTATAATAAAAGTG |
| | | | | TTTTTTTGACTCTTGAAGACATAAAGGTGTAACCTTGAT |
| | | | | GCTCAAATTAGCATGTTGAACATGATAACTTTTAAGGGG |
| | | | | TGTGACACAATGTTAAGCTTTTGAATCCCTCTTGCAAAA |
| | | | | GTCCTATGTTTGACTTTGGCTCCTACCGGTATTATGTGC |
| | | | | CCAGTGCAAGTGGTGTTTTACCTAATCCCGTTAGTTAGC |
| | | | | ACTCAACATGGTATTGGTGAGGTCCTGTGAGTTTTCCGG |
| | | | | TAACATGTTCTTGTCGTCTAAAAAATAGCACATGGAGGC |
| | | | | TTCAAATTATTGATCTTTTTATGCTGAATAAGTGTATAT |
| | | | | GTTTTGCTAACAGAAGTGGCAATGAGTTGTAAATCTTGA |
| | | | | AAGATTAGAATGGCATAAAAGTGGGCTTGAACTCATGTG |
| | | | | TTTCTCTTGAACCATTTTTATGCTGCTTACAATATAAGA |
| | | | | TTAGTGGGGTCTAA |
| 38 | Ambrosia | Genomic | 1264 | CTATATAATAGTCTGTTTGGACTAAAAGTTGTAAATTTA |
| | artemisiifolia | | | AAAATATTTCAGGTCTCCTGGAAATGCTTATGTCGAAGG |
| | | | | TGATGCTTCAAGTGCTAGTTACTTCCTTGCTGGTGCAGC |
| | | | | AGTCACTGGTGGCACTATCACTGTAGAAGGATGTGGCAC |
| | | | | AAGTAGTTTACAGGTACATTTTACCAAGAAGTTCATGTT |
| | | | | TGTTAAGAAGTTCCCAACCAATTTAAACAATATCTCCAG |
| | | | | AACGAGTGCATGTATTTTCCTTTTGATTACATACAAGTC |
| | | | | ATGCTGTTTTTCTGGTTTTTCTTTGGGTTAAGGGTGATG |
| | | | | TAAAATTTGCTGAGGTTTTGGAGAATATGGGTGCCAAAG |
| | | | | TCACTTGGACTCAGAACAGTGTCACTGTTACTGGACCGC |
| | | | | CAAGAATTCCGGAAGGAAGGAAACACTTGCGTCCCGTCG |
| | | | | ATGTTAACATGAACAAAATGCCAGATGTTGCCATGACTC |
| | | | | TTGCTGTTGTTGCCCTTTATGCTGGAACTACTGTGGTAG |
| | | | | ACAATTTGTTGAACAGTGAGGATGTTCATCATATGCTTG |
| | | | | TTGCTTTGGGAAAACTTGGATTACATGTGGAACATGACA |
| | | | | GTGAAAAGAAACAAGCCATTGTAGAAGGCTGCGCTGGTC |
| | | | | GGTTTCCGGTGGGGAAAGGGGAAGGTCAAGAAATTGAGC |
| | | | | TTTTCCTTGGGAATGCTGGAACTGCAATGCGACCACTTA |
| | | | | CTGCCGCTGTTACTGCTGCCGGTGGCAATTCAAGGTCTG |
| | | | | TTCAATTTTGATCATTTTTACAATGTAATAATGCAAAAA |
| | | | | AGTGACCATTAAATCAATTTACAATTCAACAGTTAAACT |
| | | | | GAGATGTCAGCTTTTCAATAAATTCTTTTAGTTTTGTAA |
| | | | | ACAAGTATGCTGCATTTTCCATGGAACCATCTGCTTATA |
| | | | | TGCTAATGCACTTTGTTTTATATATAACTATCATGTTTT |
| | | | | TGAGCTAATGCATGTTGTTACTTATATTTTAGCTACATA |
| | | | | CTTGATGGCATACCTCGAATGAGAGAGAGACCTATTGAG |
| | | | | GACTTGGTTACTGGTCTTAAGCAGCTCGGTGCAGACGTT |
| | | | | GATTGCACTCTTGGCACAAATTGTCCCCCTGTTTATATA |
| | | | | AATGGAAAGGGTGGTCTTCCTGGGGGGAAAGGTACGTCT |
| | | | | CATATCAGTTCTGTTATGCTTTTGTGGTTTCATATTGTT |
| | | | | GGATGAATTGTTTTGTAAGGTCGTCGTGGAACTGCTTCA |
| | | | | GAAATTGCTTTTCTAAGGTAGATACAGGAAGCCCCATAA |
| | | | | GATACCACTATAAATG |
| 39 | Ambrosia | Genomic | 910 | TTTTTCTTCCACAATTGGAATTTACCACATATCCCTAAA |
| | artemisiifolia | | | ATATATAAAAAATATAGTTGTTTTACATTTTATACAAGA |
| | | | | CAGGTGCGCAGCGATGATCATATAAACCAACATGTATCT |
| | | | | ATATATAAAATTGTAGATGCAAAGACTTCCCGTCGGCTT |
| | | | | TGGTAAATTAATGACATCATTTCTCCTGATATTTGGCAG |
| | | | | TGGCTAGCTGGAGAGTAAAAGAAACCGAAAGGATGATTG |
| | | | | CCATTTGCACAGAACTAAGAAAGGTACGAGTTATAACCA |
| | | | | TATTACTCTTAAACAGCCTTCAACCCATTATTGTTTAAT |
| | | | | ATGCTAAAAGACTCGTTTGCATTTGTAACATTTTCAGTT |
| | | | | GGGAGCAACAGTCGAAGAGGGACCCGATTATTGTGTGAT |
| | | | | CACTCCACCAGAGAAGTTGAACGTGACAGCCATCGACAC |
| | | | | GTATGATGATCACAGAATGGCCATGGCATTCTCCCTTGC |
| | | | | AGCATGCGCAGACGTTCCTGTCACTATCAAGGACCCCGG |
| | | | | CTGCACCCGTAAGACTTTCCCAGACTACTTTGAAGTTCT |
| | | | | TGAAAGATTCACAAAGCATTAAACAGAATCTTTATGGCT |
| | | | | GAAATGCTCCCTTCACCTGTTGTCTTTCTTTACATATAA |
| | | | | AATTGGTCCTTTTTTTATGTTAAGGTTGTAGCTTTCTCT |
| | | | | GAGATGGATCTGAGTGTAATTTTAAATCTTTTGCAAAAA |
| | | | | TATGTTAGCAATGTATGTTTTTTGATGCATATTAAATGT |
| | | | | GCTATTATAATAAAAGTGTTTTTGACTCTTGAAGACATA |
| | | | | AAGGTGTAACCTTGATGCCATGGGCGAACCTTTTAAGGG |
| | | | | GCGGGAGGGAGCGCCCCCCTCGAATTTTCGCTCAGAAGT |
| | | | | TGCGATTAAATGTCCTATGTTTGACTTCGGCTCTTACCG |
| | | | | GTATTATGTGCCC |
| 40 | Ambrosia | Genomic | 732 | AATGAAGGGTGATGTGAAATTTGCGGAGGTTCTTGGACA |
| | artemisiifolia | | | AATGGGGGCTGAAGTAACATGGACCGAAAACTCTGTTAC |
| | | | | GGTGAGGGGCCCACCGAGGGATGCTTCTGGAAGGAAACA |
| | | | | TTTGCGTGCTGTAGATGTCAACATGAACAAAATGCCTGA |
| | | | | TGTTGCCATGACTCTTGCCGTGGTTGCTCTATATGCAGA |
| | | | | TGGTCCTACCGCCATTAGAGATGGTATTTTCCTCAATTC |
| | | | | TGCATTTTACAAAAAAGTTTTACCAGCACAATCTAGATG |
| | | | | CCCATTTTTTCGGCTTTTCTATTCATTATAATTTATATA |
| | | | | CAGTTTGGTTGTTTATTAGCGTGCTCTCTTTTTGTTATT |
| | | | | TTTCAGTNGCTAGCTGGAGAGTCAAAGAAACCGAAAGGA |
| | | | | TGATTGCCATTTGCACAGAACTCAGAAAGGTAAAACAGC |
| | | | | CCATTATCCGATCATAGCACTTATGAATAAGTCACTATG |
| | | | | GGGTATTGTTCGCCTCAAAGAAGTTAAATAAAATAAAAA |
| | | | | AGTTANNNNNNNNNNNNNNNTCCAAAAATCTCTCTCAAG |
| | | | | CAGGCATCCTCCAAAATATTTAGAAGATTTAGATTATTA |
| | | | | TATCGACATTACCGCATTAATATTTATAAAAAGATGGAC |
| | | | | AAAATACTGTTATGGGTCAACCTAATCTCCATTGCCCAT |
| | | | | ACTAAAACATGACATGTATTTTGACCCGTTACCCCGTCT |
| | | | | TGTTACCTCTACTCATACTCATCTAACACT |
| 41 | Ambrosia | Genomic | 278 | TTGTTTATTAGCGTGTTTTCTTTTTGTTATTTTTCAGTT |
| | artemisiifolia | | | GCTAGCTGGAGAGTCAAAGAAACCGAAAGGATGATTGCC |
| | | | | ATTTGCACAGAACTCAGAAAGGTAAAACAGCGCATTATC |
| | | | | CGATCATAGCACTTATGAATAAGTCACTATATATGGGGT |
| | | | | ATTGTTCACCTCAAAGAAGTTAAATAAAATAAAAAATTA |
| | | | | TATGTTGAAACTCTCCAAAAATCCCTCTCAAGTAGACTT |
| | | | | CCTCCAAAATTGGTCTAATCCCCCTGGCCCATACTAAAA |
| | | | | CATGA |
| 42 | Ambrosia | cDNAContig | 1503 | ATGGCTNNAGCTACTACCATCAACAATGGTGTCCAAACT |
| | trifida | | | GGTCAATTGCACCATACTTTACCCAAAACCCACTTACCC |
| | | | | AAATCTTCAAAAACTGTTAATTTTGGATCAAACTTGAGA |
| | | | | ATGTCTCCAAAATCACTTGCTGTTGCAGCTTCTGTTGCT |
| | | | | ACCACAGAGAAGTCATCAGTTGAAGAGATTGTGTTGAAG |
| | | | | CCCATTAAAGAGATTTCTGGAACTGTTAACTTACCTGGA |
| | | | | TCCAAGTCTTTGTCTAATCGGATCCTTCTTTTAGCTGCT |
| | | | | CTTGCTGAGGGCACAACAGTGGTCGACAACTTGCTGTAT |
| | | | | AGTGATGATATTCTTTATATGTTGGACGCTCTCAGAACT |
| | | | | CTTGGTTTAAAAGTGGAGGATGATAGTACAGCCAAAAGG |
| | | | | GCAGTCGTAGAGGGTTGTGGTGGTCTGTTTCCTGTTGGT |
| | | | | AAAGATGGAAAGGAAGAGATTCAACTTTTCCTTGGTAAT |
| | | | | GCAGGAACAGCGATGCGCCCATTGACAGCTGCGGTTGCC |
| | | | | GTTGCTGGAGGAAATTCAAGCTACATACTAGATGGTGTT |
| | | | | CCCCGAATGAGAGAGAGACCAATCGGTGATTTAGTCACT |
| | | | | GGTCTTAAACAACTTGGTGCAGATGTTGATTGTTTCCTT |
| | | | | GGTACAAATTGCCCACCTGTTCGTGTAGCTGCCAATGGA |
| | | | | GGCCTTCCTGGTGGAAAGGTCAAACTGTCGGGATCTATT |
| | | | | AGTAGTCAATACTTGACGGCTCTGCTTATGGCAGCTCCG |
| | | | | CTTGCACTGGGAGATGTAGAGATAGAAATTATAGATAAA |
| | | | | TTAATATCTGTACCTTATGTAGAGATGACACTGAAATTG |
| | | | | ATGGAACGGTTTGGTGTTTCTGTAGAACATAGCGATAGT |
| | | | | TGGGACAAGTTTTATGTCCGAGGTGGTCAAAAGTACAAG |
| | | | | TCACCTGGAAATGCTTACGTAGAAGGTGATGCTTCAAGC |
| | | | | GCAAGTTACTTCTTAGCTGGTGCTGCCATTACCGGCGGC |
| | | | | ACCGTTACGGTGGAAGGTTGTGGGACCAGCAGTTTACAG |
| | | | | GGTGATGTGAAATTTGCGGAGGTTCTTGGACAAATGGGG |
| | | | | GCTGAAGTAACATGGACCGAAAACTCTGTTACGGTGAAG |
| | | | | GGCCCACCGAGGGATGCTTTTGGAAGGAAACATTTGCGT |
| | | | | GCTGTAGATGTCAACATGAACAAAATGCCTGATGTTGCC |
| | | | | ATGACTCTTGCCGTGGTTGCTCTATATGCAGATGGTCCT |
| | | | | ACAGCCATTAGAGATGTTGCTAGTTGGAGAGTCAAAGAA |
| | | | | ACCGAAAGGATGATTGCCATTTGCACAGAACTCAGAAAG |
| | | | | TTGGGAGCGACAGTTGAAGAAGGGCCAGACTACTGTGTG |
| | | | | ATCACTCCACCAGAGCGGTTGAATGTGGCAGCAATAGAC |
| | | | | ACGTACGATGATCACAGGATGGCCATGGCTTTCTCCCTT |
| | | | | GCCGCCTGTGCAGATGTTCCTGTCACCATCAAGGATCCT |
| | | | | GCTTGCACTCGTAAGACGTTTCCAGATTACTTTGAAGTT |
| | | | | CTTGAAAGATTCACAAAGCAT |
| 43 | Ambrosia | Genomic | 1465 | GTTTTGGTATGTTATCCAACCCTCCGTTTTTCCGCCTCT |
| | trifida | | | AGTCAAAATGAGCTATTTCTAAATGACTTGTTTTTCTGA |
| | | | | CACACTTCTATGATTCTTTTTAGCTGAATGAAGGGTGAT |
| | | | | GTGAAATTTGCGGAGGTTCTTGGACAAATGGGGGCTGAA |
| | | | | GTAACATGGACCGAAAACTCTGTTACGGTGAAGGGCCCA |
| | | | | CCGAGGGATGCTTTTGGAAGGAAACATTTGCGTGCTGTA |
| | | | | GATGTCAACATGAACAAAATGCCTGATGTTGCCATGACT |
| | | | | CTTGCCGTGGTTGCTCTATATGCAGATGGTCCTACAGCC |
| | | | | ATTAGAGATGGTACTTTCATCAATTCCCAACAACCCCTA |
| | | | | GATGCCCATTTTTCGGATTTTCTATTCATTATAATTTAT |
| | | | | ATGCAGTTTGGTTGTTAATTAGCGTGTGCTCTTTTTTGT |
| | | | | TATTTTTCAGTTGCTAGTTGGAGAGTCAAAGAAACCGAA |
| | | | | AGGATGATTGCCATTTGCACAGAACTCAGAAAGGTAAAA |
| | | | | CAGCCCATCCTTCAAAATTGGTCTATTTAGAAGACTTAG |
| | | | | ATTATTATATTGACATTAACGCATTAATATTTATAAAAA |
| | | | | TATGGACAAAATATTGTTATGCGTCGACCTAATCTCCCT |
| | | | | GGCCCGTACTAGAACATGACAAGTTTTTTGACCCGTTAC |
| | | | | GCCGTCTTGTTACCTCTGCTCATACTCATCTAACACTTT |
| | | | | ACGGGTCAACAACTTTTTCAGTTGGGAGCGACAGTTGAA |
| | | | | GAAGGGCCAGACTACTGTGTGATCACTCCACCAGAGCGG |
| | | | | TTGAATGTGGCAGCAATAGACACGTACGATGATCACAGG |
| | | | | ATGGCCATGGCTTTCTCCCTTGCCGCCTGTGCAGATGTT |
| | | | | CCTGTCACCATCAAGGATCCTGCTTGCACTCGTAAGACG |
| | | | | TTTCCAGATTACTTTGAAGTTCTTGAAAGATTCACAAAG |
| | | | | CATTAAACAGAATCTTTATGGCTGAAATGCTCTCTTTAC |
| | | | | CTGTTGTGTTTCACATATAATTGGTCCTTTTTTTTTATG |
| | | | | TTAAGGTTGTAGCTTTCTCTGAGATGGATCTGAGTGTAA |
| | | | | TTTTAAATCTTTTGCAAAAATATGTTAGCAATGTATGTT |
| | | | | TTTTTTGATGCATATTAAATGTGCTATTATAATAAAAGT |
| | | | | GTTTTTGATTCTTGAAGACATAAAGGTGTAACCTTGATG |
| | | | | CTCAAATTATGTAACATAATGTTAAGCTTTTGAATCCCT |
| | | | | CTTGCAAATGTCCCATGTTTGACTTCGGCTCTTACTGGT |
| | | | | ATTATGTGCTCAGCGCAAGTGGTGTTTTACCTAATTCCG |
| | | | | TTAGGTGGCACTCAACATGGTATTGGTGGGGTTCTGTGA |
| | | | | GTTTTCCGGTAACATGTTCTCATTGTTTAGAGAAAAAAA |
| | | | | ATGCACATGGAGGCTTCAAATTGTTCATCTATTTGTGTT |
| | | | | GAATAATTTATATGTTGCTAGTAGAAGTGGCAATGAGTT |
| | | | | GTAAATCTTGAAAGATTAGAAT |
| 44 | Ambrosia | Genomic | 1022 | TGTATATATATAAAATACATATACAATACCAAAACGCCT |
| | trifida | | | AATTTCGCCTAATTTTCGCCTAGTCCCTAGGCTGGACCT |
| | | | | CACCGCCTGCCTAGCGCCTAGCGCCTTTTGCAACCTTGT |
| | | | | AAACATCTTATTAATAATGATACCTTTTGTTTCATCTTT |
| | | | | ATGTAACCTTTTCTGGTCTTAATATGCAGGTCAAACTGT |
| | | | | CGGGATCTATTAGTAGTCAATACTTGACGGCTCTGCTTA |
| | | | | TGGCAGCTCCGCTTGCACTGGGAGATGTAGAGATAGAAA |
| | | | | TTATAGATAAATTAATATCTGTACCTTATGTAGAGATGA |
| | | | | CACTGAAATTGATGGAACGGTTTGGTGTTTCTGTAGAAC |
| | | | | ATAGCGATAGTTGGGACAAGTTTTATGTCCGAGGTGGTC |
| | | | | AAAAGTACAAGTAAGTCTGTTTTTTCATGAAAGTCATTT |
| | | | | CCTTTTTGTGAAGATTGGTCGACGGGTTTATATGGTAAT |
| | | | | TATCTGTTTCCAGGTCACCTGGAAATGCTTACGTAGAAG |
| | | | | GTGATGCTTCAAGCGCAAGTTACTTCTTAGCTGGTGCTG |
| | | | | CCATTACCGGCGGCACCGTTACGGTGGAAGGTTGTGGGA |
| | | | | CCAGCAGTTTACAGGTGTGATCAGTAATCATATTCATCA |
| | | | | GCTTCATAAAGCACATCCAAACACCCCAAACTATCTCTA |
| | | | | CTTACATCTATGCATACGTCATATGATCTTACCCTTTCC |
| | | | | GTTTGTTGTTTCTTTAAACTAGGGGGATGTAAAGTTTGC |
| | | | | TGAGGTCCTCGGACAAATGGGTGCAGAAGTAACATGGAC |
| | | | | AGAGAACTCAGTGACGGTGAAGGGCCCGCCAAGAAACGC |
| | | | | TTCCGGAAGGGGACACTTGCGTCCAGTCGATGTTAACAT |
| | | | | GAACAAAATGCCAGATGTTGCCATGACGCTTGCAGTCGT |
| | | | | TGCCCTTTATGCCGACGGTCCCACAGCCATTAGAGACGG |
| | | | | TATGATTGAGCATTTTATATCTTTTTTTTTAATATTTTT |
| | | | | TTTCTCCCAGAAATCACAATTAGAATTTACCATACATTC |
| | | | | TCAAAATA |
| 45 | Ambrosia | Genomic | 697 | ATATTAGATTTGTGTATTTCAAAAATCTTTTTAGAAAAT |
| | trifida | | | AAACTAGTAATAATATATTCATGACAAAATAATATTATT |
| | | | | GTGTGGGTTGGTAAGATGTTGGGGGTGGTTGGTGAAGGA |
| | | | | AATGACACTCTAAAAAGCCGCCACCAAACTCCCCACCCT |
| | | | | TTCAAAATCTTGCTTCTCCACGCAATAAATTCTTCATCT |
| | | | | TTTTCTCTGCAAATCACAAACAAACACAATGGCGATTCA |
| | | | | CATTAACAACATATCCAACTTCACAACCAATCTCACCAA |
| | | | | TACCCACAACCCCAAATCATTACCATCATCTTTTTTATC |
| | | | | TTTTGGATCCAAATTCAACAACCCCATGAATCTTGCATC |
| | | | | TCTTTCTTCCACCCAAACCATTAATAAAAGATCACTTGC |
| | | | | TGTTGCAGCTTCTGTTGCTACCACAGAGAAGTCATCAGT |
| | | | | TGAAGAGATTGTGTTGAAGCCCATTAAAGAGATTTCTGG |
| | | | | AACTGTTAACTTACCTGGATCCAAGTCTTTGTCTAATCG |
| | | | | GATCCTTCTTTTAGCTGCTCTTGCTGAGGTATGGTTATT |
| | | | | GTTATTTGATTTGTTCATAATTGTGTTTTATGGTTATGT |
| | | | | TTCTCAAAAGGGTCTTGTTCAAGATTTAATTTTGATAAG |
| | | | | TTTTTTAGTGAATTTTGTGTAATTGAATTATTATTTTGA |
| | | | | ATTGGGTGATAATATTGTATGATATGTGTGATAT |
| 46 | Ambrosia | Genomic | 439 | TATTAAATAAAATGATAAAAACTATACTGTTAAAAATAA |
| | trifida | | | TACCCCAATAAGCGATATCAAAGATTATAAGCATTTAAA |
| | | | | ACACCTTACCTGATTCTTTTGCCCGTTTTCTTTTAAGCT |
| | | | | AAGTTGTAATTTTTTGGCGGTTTCACTCATTGGAGATTT |
| | | | | GTATATTTGACCTCAGATTTCATCTTTTTATAATATCTT |
| | | | | AAAAAGTTTTAATATGGTTTTTCAGCTACATACTAGATG |
| | | | | GTGTTCCCCGAATGAGAGAGAGACCAATCGGTGATTTAG |
| | | | | TCACTGGTCTTAAACAACTTGGTGCAGATGTTGATTGTT |
| | | | | TCCTTGGTACAAATTGCCCACCTGTTCGTGTAGCTGCCA |
| | | | | ATGGAGGCCTTCCTGGTGGAAAGGTAACCAACATTTGAT |
| | | | | TGTTAATTACAGTGGCGAAGTTTGACCCGAAACTTCGGG |
| | | | | GGGGTCGGAA |
| 47 | Ambrosia | Genomic | 436 | ATGCTACAGGGCACAACAGTGGTCGACAACTTGCTGTAT |
| | trifida | | | AGTGATGATATTCTTTATATGTTGGACGCTCTCAGAACT |
| | | | | CTTGGTTTAAAAGTGGAGGATGATAGTACAGCCAAAAGG |
| | | | | GCAGTCGTAGAGGGTTGTGGTGGTCTGTTTCCTGTTGGT |
| | | | | AAAGATGGAAAGGAAGAGATTCAACTTTTCCTTGGTAAT |
| | | | | GCAGGAACAGCGATGCGCCCATTGACAGCTGCGGTTGCC |
| | | | | GTTGCTGGAGGAAATTCAAGGTTTGTCCAATTATATTCT |
| | | | | TTATGTGAGTGTTGTTTTTTGTGTTAGTCTCAATCATGA |
| | | | | AGGTACTAATGCAGAAGCCGTACCCCTGAAATTTTCTTA |
| | | | | TTTTGTATATATCAATTGGTAATTGATGTAAGATATTTT |
| | | | | TCCGAGAGGAATAAAAAACAGGGGGATATGAAGAATATT |
| | | | | AAAGTAT |
| 48 | Ambrosia | Genomic | 404 | GATCAGACCGGTCCACTCTTGTTTTAATTTGAGACAATT |
| | trifida | | | TTGATGTTGAGTCATCCCACACCAACCCCAAAAAATTCA |
| | | | | ACAACAAACTCTTATAATGATTCCCTCTACTCTACTAGA |
| | | | | GTCTACACCAACCGACTTTCTCTTTGCCCACCAAAACTT |
| | | | | TGGTTTGGTAAGAACTAAGCCCCCTTCTTTCCCTTCTCT |
| | | | | CTCTTAAAAGCCTAAAATCCACCTAACTTTTTCAGCCAA |
| | | | | GAACACAAAGCGAAATTCAGAGGTAAAGAGAAAGAATAA |
| | | | | TGGCTNNAGCTACTACCATCAACAATGGTGTCCAAACTG |
| | | | | GTCAATTGCACCATACTTTACCCAAAACCCACTTACCCA |
| | | | | AATCTTCAAAAACTGTTAATTTTGGATCAAACTTGAGAA |
| | | | | TGTCTCCAAAGTTC |
| 49 | Ambrosia | Genomic | 1209 | TGTTATGCCAGCCCTAATTTTATTCATGTAATCACTTCC |
| | trifida | | | ATAACACACATCCAAAGTTCCCAACAACCCCTAGATGCC |
| | | | | CATTTTTCGGATTTTCTATTCATTATAATTTATATACAG |
| | | | | TTTGGTTGTTTATTAGCGTGTGCTCTTTTTTGTTATTTT |
| | | | | TCAGTTGCTAGTTGGAGAGTCAAAGAAACCGAAAGGATG |
| | | | | ATTGCCATTTGCACAGAACTCAGAAAGGTACGAGTCATA |
| | | | | ATAACCATATTACTCTTAAACAGCCTCCAACCGTTATTT |
| | | | | TTTAACGCTAAAAGATTCTTTTTCATTTGGAACCTTTTC |
| | | | | AGTTGGGAGCAACAGTCGAAGAAGGACCCGATTATTGTG |
| | | | | TAATCACTCCACCAGAGAAGTTGAACGTGACAGCCATCG |
| | | | | ACACGTATGATGATCACAGAATGGCCATGGCATTCTCCC |
| | | | | TTGCTGCATGCGCAGACGTTCCTGTCACTATCAAGGACC |
| | | | | CCGGCTGCACCCGTAAGACTTTCCCAGACTACTTTGAAG |
| | | | | TTCTTGAAAGATTCACAAAGCATTAAACAGAATCTTTAT |
| | | | | GGCTGAAATGCTCCCTTCACCTGTTGTCTTTCACATATA |
| | | | | ATTGGTCCTTTTTTTTTATGTTAAGGTTGTAGCTTTCTC |
| | | | | TGAGATGGATCTGAGTGTAATTTTAAATCTTTTGCAAAA |
| | | | | ATATGTTAGCAATGTATGATTTTTGATGCATATTAAATG |
| | | | | TGCTATTATAATAAAAGTGTTTTTGACTCTTGAAGACAT |
| | | | | AAAGGTGTAACCTTGATGCTCAAATTAGCATGTCACACA |
| | | | | TTATAACTTTCAAGGGGTGACATAATGTTAAGCTTTTGA |
| | | | | ATCCCTCTTGCAAATGTCCTATATGTTTGAATTCGGCTA |
| | | | | TTACCGGTATTATGTACTCAGTGCAAGTGGTATTTTACC |
| | | | | TAATTCTGTTAGGTAGCACTCAACATGGTATTGGTGAGG |
| | | | | TCCTGTGAGTTTTCTGGTAACATGTTCTCGTCGTTTAGA |
| | | | | TAAAAAAAAATGCACATGGAGGCATCAAATTATTGATCT |
| | | | | TTTTGTGTTGAATAGTTTATATGTTGCTAATAGAAGTGG |
| | | | | CAATGAGTTGTAAATCTTGAAAGATTAGAATATATGGCA |
| | | | | TAAAAGTGGGCTTGAACTCATGTGTTTCTCTTGAACCAT |
| | | | | TTTTATGCTGCTTACAATATAAGATTAGTGGGGTCTAAA |
| | | | | AGTCACCTTTACAGAATTAGAGGTCTAAATGAAGTCATA |
| 50 | Ambrosia | Genomic | 984 | TTATTTTCTTCAATTTCTTTGGTTGTTTTGTATTTTATT |
| | trifida | | | AAAATTTAGTGGTCAAAACAACATTTTAGCACTGATCAA |
| | | | | CCTTTTAATGGAATGATGCAGTGTGTCATGAACCGTAAT |
| | | | | TTGATTTATAACGATAAAATAACAACAAATTTGTGTTTT |
| | | | | TATGTTTACAGGTTAAGCTGTCAGGATCCATTAGTAGCC |
| | | | | AATACCTTACTGCTTTGCTTATGGCTTCCCCCCTTGCCC |
| | | | | TTGGAGATGTAGAAATTGAAATTATTGATAAATTAATTT |
| | | | | CTATACCCTATGTTGAGATGACAATAAAATTGATGGAAC |
| | | | | GGTTTGGTGTCTCAGTCGAACACAGTGATAGTTGGGACA |
| | | | | GGTTCTTCATCAAAGGCGGTCAAAAGTACAAGTAAGTCT |
| | | | | GTTTTTTCATGGAAGTCATTACTTTTTTTGTGAAGATTG |
| | | | | GTCGACGGGTTTATATGGTAATTATCTGTTTCCAGGTCA |
| | | | | CCTGGAAATGCTTACGTAGAAGGTGATGCTTCAAGCGCA |
| | | | | AGTTACTTCTTAGCTGGTGCTGCCATTACCGGCGGCACC |
| | | | | GTTACGGTGGAAGGTTGTGGGACAAGCAGTTTACAGGTG |
| | | | | CATGATGACTTCTTTTTAGTTTAACTTAGAAATCTCTCT |
| | | | | GACTTGGAAGTCAAGTCAATGGCTATAAACGGTTTTTTT |
| | | | | CACGAAAGAAAATATCTTTGTATATTTGGTAATTTTTTA |
| | | | | ATAAAATTATCACATCTTTTGTGAACTTTCTAAAGAAAT |
| | | | | ATAAAGTTATGTTGTTTGACGTAACAAGTCGCGACTAAA |
| | | | | TGTGTCAGTTTCAATTCAAAGTGTTAAACTTGTCAATCT |
| | | | | AAAGTTGTACTTAACTGATAATGGGTAAAAACGTGTAAT |
| | | | | ATTTAGCAATTATCTAAACGTGAAACGGGTGAAATACGT |
| | | | | TGAGCATCTAAAAGGGCAAAAAAATCATCTAAAGTGCAT |
| | | | | TCAAATGTTTACATCATCCTAGATTTAGAAATAAATCAT |
| | | | | ATTGTTATG |
| 51 | Ambrosia | Genomic | 980 | ACTTAATGATTCAGCACTTAACCGTTCAGACCTCATAAT |
| | trifida | | | GATTCAGCACTTTATCAACCAAACAACCCCTTAGTTAAT |
| | | | | AGGAATCTGTACTGGTTTTGCATTTTACATAGCACTAAC |
| | | | | ATATGATGAAAAGATTGCTATTCGTCATCTATTTGGTAC |
| | | | | AAACTTAGTTGTTCATAGTTGTTTCGACTTTCGTCTATG |
| | | | | GAAATCATGAAAGCTTAAATCGATTTAAACCATTCACGG |
| | | | | TTCGCCTCCATATTGCATGTCTGCTTATGTATTAACTGA |
| | | | | ATGCATGTATTTTCATGATATGAATATTTGATTTGATCA |
| | | | | TTGATTTGAAATAGTGTTTTTGTCATGAGCATATAGAGT |
| | | | | TCGACCATTTGTTATAGTGTGAATTTGTCAAGCTATAAA |
| | | | | TTCATCTACGCCACTTCAGCAAACTATTTCATTGACATT |
| | | | | TTTAGCCTTCAGTTTATATTTAACAGATCTAAGTGAATT |
| | | | | GATATTTTCAGGGGACTATTGTTGTAGACAACTTATTGA |
| | | | | ATAGTGATGATGTTCATTATATGCTTGGAGCTTTGAGAG |
| | | | | CTCTAGGGTTAAATGTTGAAGAAAATGGTGAGATCAAAA |
| | | | | GAGCAACTGTGGAAGGGTGCGGTGGTGTGTTTCCGGTGG |
| | | | | GTAAAGAAGCCAAGGATGAAATCCAGCTTTTTCTTGGAA |
| | | | | ATGCCGGAACTGCTATGCGTTCGTTGACTGCTGCAGTTA |
| | | | | CTGCTGCTGGTGGAAACTCAAGGTATTTTTAAATAGGAC |
| | | | | ACTATTAATAAGGGTCTGCATGTGTCGGGTCGGGTTGTT |
| | | | | GTATTAAATAAAATGATAAAAACTATACCGTTAAAAATA |
| | | | | ATACCCTGATAAGCGATATCAAAGATTATAAGCATTTAA |
| | | | | GAACACCTTACCTGATTCTTTTGCCCGTTTTCTTTTAAG |
| | | | | CTAAGTTGTAAATTTTTGGTGGTTTCACTCATCGGAGAT |
| | | | | TTGTATATTTGACCTCAGATTTCATCTTTTTATAATATC |
| | | | | TTAAA |
| 52 | Ambrosia | Genomic | 429 | TGATCAGTAATCATATTCATCAGCTTCATAAAGCACATC |
| | trifida | | | CAAACACCCTAAAATAAGTCTACATACATCTATGCATAC |
| | | | | GTCATATGATCTTACCCTTTCCTTTTGTTGTTTCTTTAA |
| | | | | ACAAGGGGGATGTAAAGTTTGCTGAGGTCCTTGGACAAA |
| | | | | TGGGTGCAGAAGTAACCTGGACAGAGAACTCAGTGACAG |
| | | | | TGAAGGGCCCGCCAAGAAACGCTTCCGGAAGGGGACACT |
| | | | | TGCGTCCAGTCGATGTTAACATGAACAAAATGCCAGATG |
| | | | | TTGCCATGACTCTTGCAGTCGTTGCCCTTTATGCCGACG |
| | | | | GTCCCACAGCCATTAGAGACGGTATGATTGAGCATTTTA |
| | | | | TATCTTTTTTTTAATATTTTTTTCTCCCAGAAATCACAA |
| | | | | TTAGAGTTTACCAATCATTCTCAAAATAAAAATAAAAAA |
| 53 | Ambrosia | Genomic | 234 | AAAGAGATTTCTGGAACTGTTAACTTNNNNNGATCCAAG |
| | trifida | | | TCTTTGTCTAATCGGATCCTTCTTTTAGTTGCTCTTGCT |
| | | | | GAGGTATGGTTATTGTTAGTTGATTTGCTCATAATTGTT |
| | | | | TTTAATGATTATGTTTCTGAAAAGGGTCTTGTTCAAGAT |
| | | | | TTAATTTTGATAAGTTTTTGAGTGAATTTTGCATATTTG |
| | | | | AAATTATTGTTTTGAATTGGGTTATAATATTGTATGATA |
| 54 | Ambrosia | Genomic | 219 | GTTTTAATATGGTTTTTCAGCTACATACTAGATGGTGTT |
| | trifida | | | CCCCGAATGAGAGAGAGACCAATTGGCGATTTAGTCACT |
| | | | | GGTCTTAAACAACTTGGTGCCGATGTTGATTGCTTCCTT |
| | | | | GGTACAAATTGCCCACCTGTTCGTGTAGCTGCCAATGGA |
| | | | | GGCCTTCCTGGTGGAAAGGTAACCAACATTTGATTGTTA |
| | | | | ATTACAGTGGCGAAGCTTGACCCG |
| 55 | Ambrosia | Genomic | 26 | ACTAGTTTCGGGGGGTCGAAACCGTA |
| | trifida | | | |
| 56 | Ambrosia | cDNA | 1721 | AACAAACACAATGGCGATTCACATTAACAACATATCCAA |
| | trifida | | | CTTCACAACCATCTCACCAATACCCACAACCCCAAATCA |
| | | | | TTACCATCATCTTTTTTATCTTTTGGATCCAAATTCAAC |
| | | | | AACCCCATGAATCTTGCATCTCTTTCTTGCAACCAAACC |
| | | | | ATTAATAAAAGATCACTTGCTGTTGCAGCTTCTGTTGCT |
| | | | | ACCACAGAGAAGTCCTCTGTTGAAGAGATTGTGTTGAAG |
| | | | | CCCATTAAAGAGATTTCTGGAACTGTTAACTTACCTGGA |
| | | | | TCCAAGTCTTTGTCTAATCGGATCCTTCTTTTAGCTGCT |
| | | | | CTTGCTGAGGGGACTACTGTTGTAGACAACTTATTGAAT |
| | | | | AGTGACGATGTTCATTATATGCTTGGAGCTTTGAGAGCT |
| | | | | CTAGGGTTAAACGTTGAAGAAAATGGTGAGATCAAAAGA |
| | | | | GCAACTGTGGAAGGGTGCGGTGGTGTGTTTCCGGTGGGT |
| | | | | AAAGAAGCTAAGGATGAAATCCAGCTTTTTCTCGGAAAT |
| | | | | GCGGGAACTGCTATGCGTCCGTTGACTGCTGCAGTTACT |
| | | | | GCTGCTGGTGGAAACTCAAGCTACATACTAGATGGTGTT |
| | | | | CCCCGAATGAGAGAGAGACCAATCGGTGATTTAGTCACA |
| | | | | GGTCTTAAACAACTTGGTGCCGATGTTGATTGCTTCCTT |
| | | | | GGTACAAATTGCCCACCTGTTCGTGTAGCTGCCAATGGA |
| | | | | GGCCTTCCTGGTGGAAAGGTCAAACTGTCGGGATCTATT |
| | | | | AGTAGTCAATACTTGACGGCTCTGCTTATGGCAGCTCCG |
| | | | | CTTGCACTGGGAGATGTAGAGATAGAAATTATAGATAAA |
| | | | | TTAATATCTGTACCTTATGTAGAGATGACACTGAAATTG |
| | | | | ATGGAACGGTTTGGTGTTTCTGTAGAACATAGCGATAGT |
| | | | | TGGGACAAGTTTTATGTCCGAGGTGGTCAAAAGTACAAG |
| | | | | TCACCTGGAAATGCTTACGTGGAAGGTGATGCTTCAAGC |
| | | | | GCAAGTTACTTCTTAGCTGGTGCTGCCATTACCGGCGGC |
| | | | | ACCGTTACGGTGGAAGGTTGTGGGACAAGCAGTTTACAG |
| | | | | GGGGATGTAAAGTTTGCTGAGGTCCTCGGACAAATGGGT |
| | | | | GCAGAAGTAACATGGACAGAGAACTCAGTGACGGTGAAG |
| | | | | GGCCCGCCAAGAAACGCTTCCGGAAGGGGACACTTGCGT |
| | | | | CCAGTCGATGTTAACATGAACAAAATGCCAGATGTTGCC |
| | | | | ATGACGCTTGCAGTCGTTGCCCTTTATGCCGACGGTCCC |
| | | | | ACAGCCATTAGAGACGTGGCTAGCTGGAGAGTAAAAGAA |
| | | | | ACCGAAAGGATGATTGCTATTTGCACAGAACTAAGAAAG |
| | | | | TTGGGAGCAACAGTCGAAGAAGGACCCGATTATTGTGTG |
| | | | | ATCACTCCACCAGAGAAGTTGAACGTGACAGCCATCGAC |
| | | | | ACGTATGATGATCACAGAATGGCCATGGCATTCTCCCTT |
| | | | | GCTGCATGCGCAGACGTTCCTGTCACTATCAAGGACCCC |
| | | | | GGCTGCACGCGTAAGACCTTCCCAGACTACTTTGAAGTT |
| | | | | CTTGAAAGATTCACAAAGCATTAAACAGAATCTTTATGG |
| | | | | CTGAAATGCTCCCTTCACCTGTTGTCTTTCTTTACGTAT |
| | | | | AATTGGTCCTTTTTTTTATGTTAAGGTTGTAGCTTTCTC |
| | | | | TGAGATGGATCTGAGTGTAATTTTAAATCTTTTGCAAAA |
| | | | | ATATGTTAGCAATGTATGATTTTTGATGCATATTAAATG |
| | | | | TGCTA |
| 57 | Ambrosia | cDNA | 1689 | TACTACTACGTGTTCTTAGGTGAAAACTCACACACAATG |
| | trifida | | | GCAGCTCACGTTAGCAACGTTGCTCATATCTCCAAACAT |
| | | | | CCAATTCAATCTTTAATAATCTTTCCAAATCCCAAACCC |
| | | | | CTTCTTCCAAGTCCTCGCCTTTCTTATCTTTTGGATCCA |
| | | | | AATACAAAACCCCATTTACCCATTTCTCTTATTCATCTA |
| | | | | ATAACAGAAAGCTTTTCACTGTTTCTGCTTCTGTTGCTG |
| | | | | CCACGTCAGCAATACCGGAGATAGTGTTGCAACCCATTA |
| | | | | AAGAGATTTCGGGTACTGTTAATTTGCCTGGCTCTAAGT |
| | | | | CTCTGTCTAATCGGATTCTTCTTCTTGCTGCTCTTTCTC |
| | | | | AGGGAACAACCATTGTTGACAACTTACTTAACAGTGACG |
| | | | | ATGTCCATTACATGCTTGGGGCTCTAAGAACTCTAGGTT |
| | | | | TACGTGTTGAGGAAGATGGTGCAATTAAAAGGGCAGTTG |
| | | | | TGGAAGGTTGTGGTGGTGTTTTTCCGGTGGGTAGAGAAG |
| | | | | CTAAAGATGAAATACAGCTTTTTCTTGGTAACGCAGGAA |
| | | | | CTGCTATGCGCCCTTTGACTGCTGCAGTTACCGCTGCTG |
| | | | | GTGGTAATTCAAGCTACATACTAGATGGAGTTCCTCGAA |
| | | | | TGAGAGAGAGACCAATAGGTGACTTAGTCACAGGTCTTA |
| | | | | AGCAGCTTGGTGCAGATGTCGACTGTTTCCTCGGGACAA |
| | | | | ACTGCCCGCCTGTGCGTGTAGTTGGAGGTGGGGGCCTTC |
| | | | | CTGGCGGAAAGGTTAAGCTGTCAGGATCCATTAGTAGCC |
| | | | | AATACCTTACTGCTTTGCTTATGGCTTCCCCCCTTGCCC |
| | | | | TCGGAGACGTAGAAATTGAAATTATTGATAAATTAATTT |
| | | | | CTATACCCTATGTTGAGATGACAATAAAATTGATGGAAC |
| | | | | GGTTTGGTGTCTCGGTCGAACACAGTGATAGTTGGGACA |
| | | | | GGTTCTTCATCAAAGGCGGTCAAAAGTACAAGTCGCCCG |
| | | | | GAAACGCGTACGTAGAGGGTGATGCTTCAAGTGCAAGTT |
| | | | | ACTTCTTGGCTGGTGCTGCTATAACTGGTGGCACCATCA |
| | | | | CTGTTGAAGGTTGTGGAACAAGTAGCTTACAGGGTGATG |
| | | | | TGAAATTTGCGGAGGTTCTTGGACAAATGGGGGCTGAAG |
| | | | | TAACATGGACCGAAAACTCTGTTACGGTGAAGGGCCCAC |
| | | | | CGAGGGATGCTTCTGGAAGGAAACATTTGCGTGCTGTAG |
| | | | | ATGTCAACATGAACAAAATGCCTGATGTTGCCATGACTC |
| | | | | TTGCCGTGGTTGCTCTATATGCAGATGGTCCTACAGCCA |
| | | | | TTAGAGATGTTGCTAGTTGGAGAGTCAAAGAAACCGAAA |
| | | | | GGATGATTGCCATTTGCACAGAACTCAGAAAGTTGGGAG |
| | | | | CGACAGTTGAAGAAGGGCCTGACTACTGTGTGATCACTC |
| | | | | CACCAGAGCGGTTGAATGTGGCAGCAATAGACACGTATG |
| | | | | ATGATCACAGGATGGCCATGGCTTTCTCCCTTGCCGCCT |
| | | | | GTGCGGATGTTCCTGTCACCATCAAGGATCCTGCTTGCA |
| | | | | CTCGTAAGACGTTTCCGGATTACTTTGAAGTTCTTCAGA |
| | | | | GATTCACCAAGCATTGATGTTTTCAATAGAGTTTTTGTT |
| | | | | TTATTTGTAACATGCCAAATATGTGATTTTTGGAATATT |
| | | | | TTATTTGTAATTCTTTGGAAGTATGAATGATAAGATTTG |
| | | | | AGTGTGTATTTT |
| 58 | Chenopodium | cDNA | 1432 | TTTAAGAACTCTTGGGCTAAATGTAGAGGATGATAAGAC |
| | album | | | AGCCAAAAGGGCAATTGTGGAGGGTTGTGGTGGTCTATT |
| | | | | TCCTGCTGGTAAAGAGGGAGGGGGTGAAGTTGAACTTTT |
| | | | | CCTTGGAAATGCAGGAACAGCAATGCGTCCATTGACAGC |
| | | | | CGCAGTTGCTGTTGCCGGAGGAAAGTCTAGTTATGTACT |
| | | | | TGATGGAGTGCCAAGAATGAGGGAGCGACCCATTGGGGA |
| | | | | TTTGGTAGCTGGTCTGAAGCAACTTGGTGCTGATGTTGA |
| | | | | CTGTTTTCTTGGCACGGATTGTCCTCCTGTCCGGGTTAA |
| | | | | TGCTAATGGGGGCCTTCCAGGGGGAAAGGTCAAGCTCTC |
| | | | | AGGATCAGTTAGTAGCCAATATTTGACTGCGCTGCTCAT |
| | | | | GGCAACACCTTTAGGTCTTGGAGACGTTGAAGTTGAAAT |
| | | | | CATTGATAAATTGATTTCTGTACCTTATGTGGAGATGAC |
| | | | | AATAAAGTTGATGGAACGTTTTGGTGTGTCAGTAGAGCA |
| | | | | TAGTGCTAACTGGGATAGGTTCTTGATCCGAGGTGGTCA |
| | | | | GAAGTACAAATCTCCTGGAAATGCATATGTCGAGGGTGA |
| | | | | TGCTTCAAGTGCTAGTTACTTCCTAGCAGGGGCTGCAGT |
| | | | | CACTGGTGGAACTGTGACTGTTGAGGGTTGTGGAACAAG |
| | | | | CAGTTTACAGGGTGATGTAAAATTTGCCGAAGTTCTTGA |
| | | | | GAAAATGGGTTGCAAGGTTACCTGGACAGAGAACAGTGT |
| | | | | CACTGTAACTGGACCGCCCAGGGATTCATCTGGAAGAAA |
| | | | | ACACTTGCGCGCCGTTGATGTCAACATGAACAAAATGCC |
| | | | | AGATGTCGCTATGACTCTTGCTGTTGTTGCCCTTTATGC |
| | | | | AGATGGGCCCACTGCCATCAGAGACGTTGCTAGCTGGAG |
| | | | | AGTGAAGGAAACAGAACGGATGATTGCCATTTGCACAGA |
| | | | | ACTCAGAAAGCTTGGGGCAACCGTTGAGGAAGGACCTGA |
| | | | | TTACTGTGTGATCACTCCACCTGAGAAACTAAACGTGAC |
| | | | | AGCCATTGACACATATGATGATCACCGAATGGCCATGGC |
| | | | | ATTCTCTCTTGCTGCCTGTGCTGATGTTCCTGTCACCAT |
| | | | | CAACGACCCAGGGTGCACTCGCAAAACCTTCCCAGACTA |
| | | | | CTTTGACGTTTTGGAAAGGTTTGCCAAGCACTGAGTTGC |
| | | | | CATCTATTGGTTATCTAGAGCATACAAATTTGAATCAAG |
| | | | | ATTAAAATGCTTTCAGCTTCAGCTTTCGCCGCATTCTTT |
| | | | | GTATCATGTTTGTAAGATTTTAGTTTATACAGTGTATTA |
| | | | | ATTTTGTATCAGGCCAGTTAGAAATAATATTCTTGAAAA |
| | | | | GATGAACTATGAGAATGTGATTTAGAAACTAGTATTGGG |
| | | | | GTCTGAACTCTACAGCAATAACTGCAGAGTTTTGACACC |
| | | | | ATATTTTGGTAATGTGAGTTCCATACTG |
| 59 | Conyza | Genomic | 15055 | TCAACAAAATCTTTCACCATGTCAAACAACGAAAACCAA |
| | canadensis | | | AGTAACGACCTTTGGAATCACTTTCAAGAAAACCCGATG |
| | | | | CTGAGTATGCCCCTGATGCCGCCTATACCGGTTATATCA |
| | | | | TCAGCTAACCAAGGCCAAACAAGCCATGTTTCAGGCTCA |
| | | | | TCCAACCCGACCCCAATGGGGAGACCAGTTCCGACGGGT |
| | | | | TTGTCGCAATACGACCTAGAAGCACATATGAGTTATCGC |
| | | | | CAACACTTGCAACAGAACTATGCAAGCTCGTTTTATGCA |
| | | | | CCACCGGCGGCACCGGGGCCACAACCGGGTCCTAGCCAC |
| | | | | GACCCGGAAGAGGACGAGGATGACCAGACCGCCGACGGC |
| | | | | GAGTAGTTTTTTTAAAATACTCGTAATGTTTTATTTTTC |
| | | | | TTTGCAATGTTTTATTTTTAAGTGTGTTATGTGTTTTAT |
| | | | | TTTTAGTGGTAATGTTTAATTGTAATTTTTTTTTAATTT |
| | | | | AGTTGTAATGGTTAATTTTTAATAAAATTAAGTAGTTTT |
| | | | | TTAAGTTTGTGTGTAAATAAATATAAAATAAAATAAAAA |
| | | | | AAATAAAAAGTGTGGAAGAGGGGTTATAGGGAGTGATTG |
| | | | | TGGAAGAGGTGGATGAAGAAAGAGAAAAGCTGACGTGAC |
| | | | | AGTGTGGAAGAGGGTAAGGATGAGGTGCTATAGGGAGAG |
| | | | | GTCTTATTGAGTTATAATGATGTCAATGGCTTAATAACT |
| | | | | TAATGACATTTTGGTGATGCGTAAGACCTTAAGACCAGA |
| | | | | AAGTCTAAGTTTGAATCTTATAAAATAGGTTTTTTTCTA |
| | | | | TTTTCCAAATTTATTGAGTTTTCTCATGAGTTCATGTAT |
| | | | | GAGCATTATTGCATAGTGAAAATATGGTCAGATGGTTTC |
| | | | | ATCGATGACAAGCTAATTTTTAAGAAAGATATATTACTT |
| | | | | TTCTTTTTAACTTGGGAAAATCATAAAAGTGAAATCATC |
| | | | | GTTTTAACTTTTTACGAGCATGGTACTCGCGTAATGCAG |
| | | | | CGGCGGTGGTATAGAAGACGGTCTAATGGTGGCAGTGTC |
| | | | | AAGTGGTGTAGGTCTATGTGCACCGAAACTCCAAACTGA |
| | | | | CATAGCCGTACCCATTTCCGAAACTCCATGGAAACGTTT |
| | | | | TCTCTTACGAAACACGTATGAAACATTCCCTAAAATTTT |
| | | | | CTATAGATTAAACGTTTCTTTGAAGTTTCCATACGGTTT |
| | | | | CTAATTAATATCAAGGTTTTAAAGGACTTTTTCGAATCC |
| | | | | CCAAACCCAAACATGTTATATTATATACAATTTGATCAA |
| | | | | CATTAAATTTTTTATATTACAAAGCCATTATTAAACACT |
| | | | | AAACATTCAATGAGTGATCACTAATCAAACATGTATTAT |
| | | | | AAAGTTCTACATATATAATTATACATAATCTCTCAAGTC |
| | | | | TCAAATCTCCTTTATGAAAAAATTGATATAATTTATATT |
| | | | | TGTATATTTTTTTTATTGTTGTACCCGTATCCTGGATTT |
| | | | | TTTAGTTTTACTGTTCCCCGTTCCCGTATTGTTCCCGTA |
| | | | | CCCTTTTCCCGTACCTGTTTCGGTGCTACATAGGTGTAG |
| | | | | GTTGATGTAATTGTGATAGTGAAAAGTTTTAGAAGATAA |
| | | | | GAGTTTAAAGTGTTAAGTATTAAAATAAGGGTTTATGGT |
| | | | | GTAAATTAATTCATTAAGGGGAAAATTTATAAAACTATT |
| | | | | TCTATAGTGGGTTTTTATTAAGAGACAATTTAGTAATTT |
| | | | | TATATGTGACATATGAGTAACTATTTTTATTTTGAGAGG |
| | | | | GGTGCATAATTTTTATTCGAAGAGTACGGATAAAAGTCA |
| | | | | ATAAATTACGAGCAGTGAAGTATCCCAGACACCCCTTGC |
| | | | | AAGGTAATTTTTTAAAATTTTATTCATGGAGGTTTGGTA |
| | | | | GGAAGTGGTGGTGGTGGTGGTTGGTATGAAATTTTGTTT |
| | | | | TTGACCTTCTTCAAACATCCACCTACTACTGACCCCTCC |
| | | | | CTTCAAACCCAACCCAAAATCCAAATCATTAAATCCTTC |
| | | | | AAACCCACTGTGTGTTTTGTGTGAAATTTCACACACAAC |
| | | | | AAACAATGGCAGCTACTCACATTAACACCACCAACATTG |
| | | | | CCCACAATCTCCAAGCTACCACCAGTCTTTCCAAAACCC |
| | | | | AAACCCCATCAATAAAGTCACAACCTTTTTTATCTTTTG |
| | | | | GGCCAAAACACAAAAACCCGATTGCCCATTTCTCTGTTT |
| | | | | CTTCTAATAATAATAGAAATCTTGGAAAAAAATGTTTAA |
| | | | | TAGTTTCTGCCGTTGCCACCACCGAGAAACCGTCAACGG |
| | | | | TGCCGGAAATTGTGTTACAACCCATTAAAGAAATCTCGG |
| | | | | GTACGGTTAATTTACCCGGGTCCAAGTCGTTGTCTAATC |
| | | | | GGATCCTCCTCCTTGCTGCGCTTGCTGAGGTATAGTTTA |
| | | | | ATTTGGTAATAATGTTTGACCTTTAAAATTTGACATTTG |
| | | | | GGCTACATGATTGATATGGGTCTTGAATGAATTGTGTTA |
| | | | | TAAAATTTGGGAAGTTAAATGTTAATAATAGTTTAATCC |
| | | | | TTTAGAAATTATGAAGTAATGGTTTTAGACCCTGAATTT |
| | | | | TTTTTTATTGCATAGGTTAGTCCCTTAGCTAGTTAGCTT |
| | | | | TTGGTTGACATCTTAGAAAAACCAGTACAGTTTTTATAT |
| | | | | TTTAGTCCTTAAGCTTCAATTTTTTGCAATGTATTGCCA |
| | | | | TTTGAAATGATCTAGTAAAATGTTCAAAATCAATGAATT |
| | | | | GGCGGTTTAAAGATATAATGCTTGGATCAATTGTTATGT |
| | | | | AAAGTGTGCTAGGCGGTCAAAAGCGAATCTTGGATCAAG |
| | | | | GAAGTCGTAGAATACTATTGATTTCATATTATTGATTTC |
| | | | | TTATTATGCATATTTGACATGTGCTTCTAACATCATGGC |
| | | | | ATTTGGGATTTATTTCTATATATAAAGCATGACTGTATG |
| | | | | GTTATAAAGTTCAAAACTTGTATGGTATAAATATACTCT |
| | | | | TCTTACTTCTTAGCAGGAATGTGTTGACTTATAAGCTGA |
| | | | | AAACTTTTATAACTCCAATTGTGTGTAGTAATACTTGAA |
| | | | | AGTGGCTGAGTTCCTAGGACAGTATTACATGCGAACACT |
| | | | | ACAACGTGTTACTAAATTTGAGATAGGTATGATTTGGTT |
| | | | | TTGTTGGATACAAAGTCTAGGTCAGTTAACATAGCCAGT |
| | | | | TGAGGACGATAGCTTTCTTGTCTTATTTCCTTTTTATAG |
| | | | | AGGGTTTGTGTTTCGTGATGGTAATATTGAGTACCACCA |
| | | | | TATAGTTCACAAGTCATATAATAAAATCAGAGCAACATT |
| | | | | CGAGGAGTCGCCTATATGCATATTATTGCACCATGCTAA |
| | | | | AATCCAAGGGCATATTTTGATGCCAATTTGTAATTTATT |
| | | | | TCTCAGGGAACGACCATTGTTGACAACTTACTCAACAGT |
| | | | | GATGATGTTCATTACATGCTTGGAGCTTTAAGAACTCTA |
| | | | | GGGCTAAACGTTGAGGAGGATGTTGCAATTAAAAGGGCA |
| | | | | ATTGTGGAAGGTTGTGGCGGTGTGTTTCCTGTGGGTAAA |
| | | | | GAAGCTAAAGATGACATACAGCTTTTTCTTGGGAATGCA |
| | | | | GGAACTGCTATGCGTCCATTGACTGCCGCAGTTACTGCT |
| | | | | GCTGGTGGTAATTCAAGGTATTTGGACGTTGTCATTGAC |
| | | | | TCATTGCTATAGTAAATATATGTTGACTTGTGCACACAA |
| | | | | GATTTGAAGCATCTTTTAAACATATATGATTAGATACAG |
| | | | | AGAACACTGCATGTTGAAAACTTGAAATACAGGACTTTC |
| | | | | TTAAAATATTGGGATTTCACATATATGGGTTGAATAGTT |
| | | | | GAAATTTCCTCCTTCTACCTTTAACCAATTGTATATTAC |
| | | | | TTATTTAAAGTTGTGTTTTAAACATGGCGATATGATTAG |
| | | | | ATACAGAGAACACTACTTATTGAAAGGTTTATGTGGTAT |
| | | | | AGTATGAATTTTAACCTCAAAAAGGGTATCTCACTATCT |
| | | | | CTTCATATAGAAGCACACATCTGATTCTGTTATATCTTT |
| | | | | ATGGATCATTTTTTCCAGCTACATACTAGATGGCGTTCC |
| | | | | TCGTATGAGAGAGAGACCAATAGGTGATTTGGTCACGGG |
| | | | | TCTTAAGCAGCTTGGGGCAGATGTTGACTGTTCTCTCGG |
| | | | | GACGAACTGCCCTCCCGTGCGTGTAGTTGGTGGAGGTGG |
| | | | | TCTCCCTGGAGGAAAGGTATTGTGTTTTCATTAGTAGTT |
| | | | | GTTTTCTATGCAAATAGCAACACACCTTATATATCATCC |
| | | | | ATTTATAGCTATTTTTCTAATTGGGGCGTACGTTACTGT |
| | | | | AATTTGATCGTCCAACCAGTTGTCATGACCCTCCTTAGC |
| | | | | TAAAATGGATGAAAGCTGGTCCGACAATTGACCATAATA |
| | | | | AATGGGTGTGGGCTATCTTGCTAAATTTAAGTATTTCAC |
| | | | | TTAAAATGAGAGTTGGTTTACAGTGTGCATTCAACCTAA |
| | | | | TTTTTTTTTTTAACGTCGCATACAACCTAAAATTGAATA |
| | | | | ATGTTGTAGACACAAAAGCTCTTAGTGAGCTTTAATAGT |
| | | | | AACATTAGAGGTGGTGATATCAATCAAACAATAAGGGAA |
| | | | | AAGTAATATGTATAAAAATTAGAATTAAACAAGAAGTTT |
| | | | | TAAAAAATAGATCAAATGGTTTGAAAGTCTTCTAAAGTG |
| | | | | TAATTTAATGCATAAATCTTCCTAAATTATTTTATTTAA |
| | | | | AAACTGTATTGTAATATAATTTTCATCATCATATTTGAC |
| | | | | ATTCTATGAAAACAAATATACATTTTGAACAAACAGTGT |
| | | | | TACGGATCGACCCAGGCAATTCAAAGCTGTCCATTCTAA |
| | | | | CCTAAACCAGTTTTCACGGTTACCTCTATTTTCCTGCCT |
| | | | | TTCAATTTGCCAGCTACAAGAAGCTTCATTCCACCATAA |
| | | | | CGGGTTCACGCTAAAGATGCAAAGAGTCATGATTCGTTA |
| | | | | TTTATTATCTTGACTTATTATGATAACAATAGTTTTGGT |
| | | | | GTATTTTGATGTCTTCAGGTTAAGTTGTCGGGATCTATT |
| | | | | AGTAGTCAATACCTTACTGCTCTGCTTATGGCTTCTCCC |
| | | | | CTTGCCCTTGGGGACGTGGAAATTGAAATCATAGATAAA |
| | | | | CTAATTTCCATACCATATGTCGAGATGACACTGAAATTA |
| | | | | ATGGAACGGTTCGGCGTCTCGGTAGAACATAGTGATAGT |
| | | | | TGGGACCAGTTCTTTATTCGAGGCGGCCAAAAGTACAAG |
| | | | | TAAGTCTATTTCTTTCTTTTTAAAGTAAAACTGGAATTT |
| | | | | AAAAAGGTTGCAGTTTCTACCCTATCTCTTGTAATGGGT |
| | | | | TGATTCAGGTTATGTATAATCTCTAATGGGTCAAAGGGG |
| | | | | GTAAAATACAAAAAGGTTATTTTGTCACCAAAACGATAT |
| | | | | GATGCATATTACCTAGTTTTCTTATTGGAATAGTAAACA |
| | | | | TTTTTAATCATTTCAATGTACAACTCTTTTATGTGTCCA |
| | | | | CAGAAATTAAACATAGCCCCTAGGACTATGTTCATCATT |
| | | | | TCCCTTTATAAACTAGTTGGAGAAAAGTATTTTGGCCAA |
| | | | | CCCATTCCGAATTTACACATTTTGGCCTATCACCCAGCC |
| | | | | CGTCTGTCCACTCATTTTCAGGGTTTTGTATGGAGACCC |
| | | | | GTTTGTTAATTAGTTGGATTAATTATCTTCAGGTCACCT |
| | | | | GGAAATGCTTATGTAGAAGGTGATGCGTCAAGTGCGAGT |
| | | | | TACTTCTTGGCTGGTGCTGCCATAACCGGAGGCACCATC |
| | | | | ACCGTTGAAGGCTGCGGAACAAGTAGTCTGCAGGTGCAC |
| | | | | TTTGACCTCCTTTGTTTTTTATTCTTCTCGATTTCAATC |
| | | | | AAACGGCTTTACGGTTTTACATTTTAAATGGATTTTGTG |
| | | | | GAAACAACGAGTATTAAAAGTTCATCAAAAGATTTTATT |
| | | | | ATTATTTTTATGCAACAATTATCAGCATCTGTAGTGAAA |
| | | | | TATTCAGAAGTCCGTTTTTAGTTCAAAGTTTTTCTTTTT |
| | | | | AACCTTAAAGTCAAAAGTGAGATGGCAAATCTTTTACGT |
| | | | | AAAATGATTCAATTGAGGCTGTACTTTGGTCGATTCTGA |
| | | | | CTTAATTGGGAACATAGGTTACGTTAGCTATAAGCCTAT |
| | | | | AACTATAAGTAAGCATGTGTTTATATGTCACAATGACTT |
| | | | | GATTAAAAGTAACCTTATGATTTTCTTAGTATACGTTAG |
| | | | | TAATCTAACAGTATCATAATAACGGACAAAAATGTGCTG |
| | | | | GTGGATCAGCCCACCCAGCCCGTTAGAACATGACATAAA |
| | | | | AATGACCCAACTTGACCTATCACCTAAGCTCATTATAAT |
| | | | | ATGTTATCCAACCCACCCTATCTTGGCACCTGTGACCTG |
| | | | | TATTCAAATGTATACTGTAAGCAACTTCCTGTTTTTCTT |
| | | | | AAACATGTATTCTGTTTTTTCTTTCCAATGAAGGGTGAT |
| | | | | GTGAAGTTTGCGGAGGTACTTGGACAAATGGGTGCGGAA |
| | | | | GTAACATGGACTGAGAACTCAGTCACAGTTAAGGGCCCA |
| | | | | CCAAGGGATTCTTCTGGAAGGAAACATTTACGTGCTGTT |
| | | | | GATGTGAACATGAACAAGATGCCTGATGTTGCCATGACT |
| | | | | CTTGCTGTGGTCGCTCTTTATGCTGATGGCCCTACAGCC |
| | | | | ATTAGAGATGGTATCCTTCCTTTTAATGTGGAAAAAAGT |
| | | | | TCAACATGTTTTCACTAAGTTTTCAAAGTAAATAGATAG |
| | | | | ATATGACTTCAAAATAACTCTATTGCCATGTTAAATCTT |
| | | | | ACACATATTGCAAGCACATTCTAGTGGTGGTTTGGAATG |
| | | | | GCATTATGAAATTGAATATCTAAAATATTTAATTTAAAC |
| | | | | ATGTTCGGTTTCTGATCATTTAGGGTCAGTTTTAACTGA |
| | | | | ATCTCAGAGAAGTCGCGCAAGACATGTCACATATTTGTT |
| | | | | TCTCCGAGTCTCAGACAACTGCTTTTTCAAAATGAAAGC |
| | | | | ATTCTAGAACTATTTTGCTTACAGTTGATTTTCTAATTC |
| | | | | TGGGTGTACATAAATCAAGATAATTACTTTTATAAAACA |
| | | | | CATTCAAAAAGCCTCCTAGATGCCCCTATTATGAATTTT |
| | | | | CTGTTTGCTATACGAGTATCTGCTTTGTTTTTGAAAATG |
| | | | | GTTTTTTTGTTTTTTGCCAGTTGCTAGCTGGAGAGTTAA |
| | | | | AGAAACCGAAAGGATGATTGCCATTTGCACAGAACTTAG |
| | | | | AAAGGTAAAATGATACTTTGTTACTCTGTGATCTATGAT |
| | | | | ACTGCTATTGCTTAGAGGTCACTAAAGTGGTAAGGTCAA |
| | | | | ATAGGATGGGTTTGAATGGGAACACTTTTCGCCCAAAAC |
| | | | | ATATTTAACTAATATAATTTCACTTGTTACTATCTAATT |
| | | | | TCATAAATGAAATGATTTAGAATTAGAATGTTTTGGGTG |
| | | | | TCTTGCAACCTATTCATTTTAAGCTATTTTAATTGTCTT |
| | | | | TTGACCCATTAGAAATATACATAAGAAATATACTTAATC |
| | | | | AGTCCTCTATTGTTAATGTTTATCTGGGGTGAAATTTCT |
| | | | | TCAGTTGGGAGCAACAGTTGAAGAAGGTCCGGACTATTG |
| | | | | TGTGATCACTCCGCCAGAGAAGTTAAACGTGACAGCAAT |
| | | | | AGACACATATGATGATCACAGGATGGCCATGGCTTTCTC |
| | | | | TCTTGCCGCTTGTGCAGATGTTCCTGTGACCATTAAGGA |
| | | | | TCCTTCTTGCACACGTAAGACGTTTCCTGATTACTTTGA |
| | | | | AGTTCTTCAAAGATTTGCCAAGCATTAATGTGATTATGG |
| | | | | GTAGTGGTTTGCTTTTCTATATGTAATTTTTGTTTCATT |
| | | | | TGTAACGAGTAAAATGTGAGTTTTGGGCATAACATATTC |
| | | | | TTATGAACTTGTATTCTTTCGTAAGATTTTTTTAGTGTA |
| | | | | ATAAAATATTTTGCTATTTCAGTTGATGATTTCTATTAC |
| | | | | GGTAATTATGCATCTGACTTCCACTTATACTACGATGTG |
| | | | | CATGGCTTTGCGTGAACAGATTGCCAAACAATTTAGTCA |
| | | | | TGTGGCTGGTTTGATTGCCCACACTTGTTGAGTTGTTGG |
| | | | | CTAGTCGAGTTTGGGTGATCAGAACCCATGTGGCTCGGT |
| | | | | TTACACTTTGCGCCCTAACATGTGTGTTTTAAAGGTTAA |
| | | | | TTAAACTTATTAAACGGCTTAGTAATTTAAGTCAATAAA |
| | | | | ATCATTCAAGTTTCTTTTGTTCCTTTGGAATGATTTAAG |
| | | | | CTAATATGAAAAGGGTACTTTTCTTAGACAAAAGTCAAA |
| | | | | ATGTGAATATTTACTTTCAAATGAACTCTGGTTATTTAC |
| | | | | ACGAGAAATGGGGCATTTTTATTTTGATTTTTTTAAAAA |
| | | | | AAGATCTTTCTTATTTGTTATTTATTGTTTAGATAGTAT |
| | | | | AACACTTCAAATTAAACTAAATAAAAATAAATACGACGA |
| | | | | GTAGTAAACAAGAAGAACCAATAGGAACTTCGGCATTTT |
| | | | | ATGAAGCCCAAGGTGCATGAACCTTTAAGAGCATATTCT |
| | | | | TTTATCATATTTGTAGGAAATTGTATACATACATACATA |
| | | | | CATTATAATATTATATTGTATATAGAGAAGACAAGTTAT |
| | | | | ATGTACCATTTAAGGGAAGGCATGGGACAAGGTGCCAAG |
| | | | | ATTCATAAACAAAGAGAACATGGATGCCTCGACTTGTGA |
| | | | | CTCAAATTGCTCACATGCTTTGCATCAATTTGATGACTT |
| | | | | ATATATAATCTTAACGTATTATAATAACCTTAAAAGTGA |
| | | | | AATTTAACCCATGCTTATTTTTATACCTTTACAATCTTG |
| | | | | ATTATAAGTTAAGATCGAAGCACTTTATGTTTTTTGAAA |
| | | | | ATAGTTTTTCCATCCAAAGATCATCTATGTGAGTAGGGA |
| | | | | CGAAACCAGAACTTTCACTGTGAGAGGACAAATTTAGAA |
| | | | | ATCGTATGTTATACTTAAGATCTTAAGCTTTTTGATGTC |
| | | | | TTAAACTAGTCACTTGCAAATGCATCTACTAAATTATGT |
| | | | | AAAAGTAGAACCTCACTTCAACTTTGTATTTTTAAAAAA |
| | | | | AAATTGGTATTTAAAAAATAAGGCTAGTAAATGTTAATA |
| | | | | TTAACTAAAAAAATCCTTTAAAAATAAATGTTTAGCTTC |
| | | | | ATTTAACAAATTTGAGATTATGTTTATTCTAAAAATATC |
| | | | | AGAAAGGTTAAATGCTTTGAAATTTTCTATTACTTTAAT |
| | | | | ATTTGTCCATAAATTAAAAAACCTATATATAAAATATAA |
| | | | | GGGTTAAAAGGGTTTTCTTTAAAGTAAAAGGGTCAACAT |
| | | | | AACAATCTCAATAAAGTTTTGAGATTTAAAAGGAAAAAA |
| | | | | TCTAAAAGGCAAGGTAACTTTTGCAAATATGTTGTCTTC |
| | | | | CTCCCTTGGTCTCTACAACAGCAAAGTTACAGCACCATT |
| | | | | AAAACACAAAATGCTTTATCTATTGATTTATCCATTGTT |
| | | | | ACTACAATAATAAGCTCTTAATCGTATAAAGCATGGTTC |
| | | | | CGTTATCACCTATTTAGGCTTTTCATTCTTTTTTAAAAA |
| | | | | TAAAATCCAAGTATACTTTAAAATTAAAAAAAAAATAAT |
| | | | | TAGAATTTAGCAAAATTGGACTGGGGGCAGTTGCCCCCA |
| | | | | TTGCCCGCATACTAAATCCGTCCCTGTATGAGAGGTAAA |
| | | | | ACATATTTTTCTTGTTATTGCATATATATACTACAAAAA |
| | | | | AAAATTCATTTGTCCACATTTGGTTATCGAAATTGTGAA |
| | | | | AAAATTTATGAATTTAATCACATTTAAAAGTGTGTAAAA |
| | | | | ATAATTTACATAAAATCACAATACTTATACACTTATAAA |
| | | | | TGTGTAAACAAAATATTAACACTTAAAAGTGTGAACAAT |
| | | | | TGTTAAATATTTTCATACTTAAAAGTGTGAAAGTCAATT |
| | | | | TGTGACACATGATTTCTTCACACCCTACGTGTATAAAGA |
| | | | | AAATAAGTGTTACAAATTAACTTTCACACTTTAAGTGTG |
| | | | | AATACCTCTATATTTTTACACACTTAAAACTATGAACTT |
| | | | | TTCTTTTTCACATGTATAAGTGTGTAAATATTGTGATTT |
| | | | | TTTAAATTTCTTCACACTTTGAAATGTAAATTATACACA |
| | | | | TTTTTAAATGTGATTAAATTAACAAAAATTTTTACACCT |
| | | | | TTTAAAAGTATAAAAAAACAAGTGTGAGGAAATGATATA |
| | | | | TTTGTTGTAGTGATAAAACAATGTAAATATCAATGATAT |
| | | | | TATATCATATCACGAACATGACATGAAAAAGATAAATTA |
| | | | | TCATATTCTTAATCGGAATTATAAAAAAAAAAAAAACAA |
| | | | | AAAACAAAAACTATTTCTCCCTTACGCAATTTTATTATA |
| | | | | AAATTCTTGCAAATACATTAAACTATAAAAATATTGATG |
| | | | | AAGAGTCAAGTGACCAGTCCCTTACAATTTAATTAATAA |
| | | | | TATTAAAATCACTAAATCCCTAGTTTTTAAATGATGCCT |
| | | | | TTTCATTTGTAGTCACGTTGTTTGTAAAGGTAATACTTT |
| | | | | ATTAAACCTTAAGTTAGCAAAAAATAATTAAAACCATTC |
| | | | | TTGTTATCATGTCATTTTCTTAATTATTCAAAATATAAG |
| | | | | CAGTGATATAGAATTGTTAGATTAATTTTGCTATTTTAA |
| | | | | TAATAGGAAGAAATGTGTGGTATAAAATTGTTTTTTTCT |
| | | | | TTTTGTCTTTTTAAAAGTGTTCTAAATTAATTTTTTCAT |
| | | | | ATATGTATATATATACAATATTATTTACAACAAATATAC |
| | | | | TTATTTTATTACATAATATATATAATTATATATAACATA |
| | | | | TACTTTTGTAAATGATTATAAATTATTGTAAATTTATTA |
| | | | | CTCCTTAGAATAGAATTATTAAGTGAAAAAATGCGACAT |
| | | | | ATCATGTGAGAGTTGGATGCCACATTTAGTGTCAAGTTC |
| | | | | ACATGATCCTCGAGTTTTGTCCAACCTTCTTTACAGATA |
| | | | | ATTCCACAGCTACGCCTTTTAGATACGCATACAAGAGTT |
| | | | | TTGTCCAACCTTTTGTGAACAATTTTTCCCCCCCTTTTA |
| | | | | AACGGTAAATACATTTTTATAACATAATGTTAATGGAAC |
| | | | | TTAAACTCGTAAATTTTTGGTATGTACCACATCAAATAT |
| | | | | TATTAGATTATAAATGTCATTTAGTTTGCGATAATATAT |
| | | | | TTTTGGTAACGATCATTCAAAATAATTGATAGAAACAAA |
| | | | | AATAAAATAAAATAAAATATTGTGTTTGCTATTCGTGAA |
| | | | | AAGAAATCCGTGGTTCATTATAAGGTAAACAATTATATG |
| | | | | TGACTTGACATATGCTATACTTCTTAAATGACTTGGATG |
| | | | | TATTTTGTTATTAGATGAGTTATACTTATACACTTATAT |
| | | | | GCCTTGATAATGCCTTGATATTCATAACACGCAACAAGT |
| | | | | TACTGCTTATAATTTGTGAACTACAAATTTGACTCTCCA |
| | | | | ACTCTCCATAGTGATTTAAGAAATTGATTGATGATGAAT |
| | | | | ATACTTTAAAATTTTACCTATTCATATAGTTATAAGAAA |
| | | | | AAAAGAGTAAGTGTTATTTATTTTGAACACAATTTTTTT |
| | | | | TTTAATACATAAAATAGTCAAATCGATTATTTTCAAGTG |
| | | | | TGATATATGTGCATGTTATCTGATTGACGTATCAATGCT |
| | | | | AGCTAATTAAACATTAAATTAAATATATAAACTTATAAA |
| | | | | GGACTTAGGATTGTACTTGCATAATATATATAGTTTTAA |
| | | | | AATGATTCTTCTGATAGTTTTATCATGTCCAATTGATTT |
| | | | | TGTTAGTTGTTAAATAATAACAATAATGATAATAATAAA |
| | | | | ATAAATAAAATAAATAAATAATAATANNAATAATAATAA |
| | | | | TAATAATGTTTAAGGTTGCAATAACGTGTATAAAAAATT |
| | | | | ATATTTATATATCAAAAGTTCTCTCTTGAATTTTATGAT |
| | | | | AAATGTACATTTTATAACAAAATCTTTATCTTTATGAAA |
| | | | | AATAAAAAACTAAATTTTGATATGATTAAAAAAAAAAAA |
| | | | | AATGTTTTAGTATGTTAGGCTCAACTCTCACGTGACATC |
| | | | | AAAGTCATCAATAACTTAAGTTTATTTTACTGTACGAAG |
| | | | | TCCCTGCAGATTGTTAAAGGTGATCTTAAATTAAAAGCG |
| | | | | TAAAAGATCAAGTCTTCCATATAATAACCAATCACACCC |
| | | | | TAATTTTTTTACCCCAAAATCCTAATAAAATTCATGAAG |
| | | | | ATCTTGAATATTCTTTCCCTTTTACACCTCCCCCGTTTG |
| | | | | ACTTTCTTTAAATGTATACTTGAGCTTGATTAATAGTCC |
| | | | | ACCCTAATAAAATCTCACCATTTTCACACCACAATTTTA |
| | | | | TTTCAAATCTTCTTTCAAACTTTCACTCTCTGTTCTTCA |
| | | | | CCATTCTCTCTCCAATCAACTTTTTTCTGCAAACCACAA |
| | | | | TCACTCCCCTGTTCAAGAAACCTCAAGATTCCGCCATTA |
| | | | | TCAAAAAGTTTTGTTCTTTCTTATCTTGTTTTTACATTC |
| | | | | CTTACGCCAAGATTCAAAACCCACAAACCTTTCATAAAA |
| | | | | CCCAAGTCACGTATCAAGAATTTAGCACATAAAGTTGGC |
| | | | | TTCTTTTTTCATCTTCAAGATTACATCTTTTTATTCAAG |
| | | | | ATTTTTGAACAAGAATGAAGCTAATGGATGAAGATGAAA |
| | | | | CCCCATCAACTCCTGGTAAATTCAAAATAGATAATAATA |
| | | | | AATCCATATACATTCATCATAGATTCAGATTTCTACATT |
| | | | | ACAAATCTTTAGCCAAACTTACATTCTGGTCCTTTGTTT |
| | | | | TCTTGGGCTTAATCTTGGTTTTTTTCTTCAATTCCCAAT |
| | | | | CATCATCATCACAAATTGTAGATCTTTCTAGAAGATCTT |
| | | | | TAAAAACAAGTACATGGGGTGGACCCATATGGGAAAAAC |
| | | | | GGGTCAAATCATCAGCCCGGATCCGAACCCGTAATGGGA |
| | | | | TATCCGTATTAGTCACAGGTGCAGCCGGGTTTGTAGGGA |
| | | | | CACATGTCAGTATGGCCTTAAAACGGCGTGGTGATGGTG |
| | | | | TTTTAGGTCTTGATAATTTTAATGACTATTATGATCCGT |
| | | | | CGCTAAAAAGAGCTAGACAGTCTTTGTTAGATAAAAGTG |
| | | | | GGATTTATATAGTTGAAGGTGACTTAAACGATGTCGTTT |
| | | | | TGTTAAAAAAGTTGTTTGAATTAGTCCCATTTAGTCATG |
| | | | | TTATGCATTTGGCTGCACAAGCTGGTGTTAGATATGCTA |
| | | | | TGCAAAACCCTAGTTCTTATATTCATAGTAATATTGCTG |
| | | | | GTTTTGTTAATCTGTTAGAAATTTGTAAAAATGCTGACC |
| | | | | CTCAACCTGCTATTGTTTGGGCTTCATCTAGTTCGGTTT |
| | | | | ACGGGTTAAATACGAAAGTACCCTTTTCAGAAAAGGACC |
| | | | | GGACGGATCAGCCCGCGAGTCTTTATGCTGCCACGAAAA |
| | | | | AGGCAGGGGAAGAAATCGCGCATACTTATAATCATATAT |
| | | | | ACGGGCTGTCATTGACAGGGTTGCGTTTTTTTACTGTTT |
| | | | | ACGGGCCGTGGGGTAGGCCGGATATGGCGTATTTCTTTT |
| | | | | TTACCCGAGACATTTTGAAAGGGAAACCGATACCTATAT |
| | | | | TTGAAGGCCCAAATCATGGAACAGTGGCTAGAGATTTTA |
| | | | | CGTATATTGATGATATCGTAAAGGGGTGTTTAGGGGCGT |
| | | | | TAGATACTGCAGAAAAGAGTACTGGGAGCGGTGGGAAAA |
| | | | | AGCGCGGGCCAGCCCAGTTACGGGTTTTTAATTTGGGCA |
| | | | | ATACGTCGCCTGTGCCTGTTTCCGAGCTAGTTGGGATAT |
| | | | | TGGAAAGGTTGTTGAAGGTTAAGGCGAAACGAATGGTGA |
| | | | | TGAAAATGCCACGAAATGGGGATGTGCAGTTTACGCATG |
| | | | | CGAATATTAGTTTTGCGAAGAGGGAGTTTGGGTATAAGC |
| | | | | CGACAACGGATCTTCAAAGCGGGTTGAAGAAATTTGTGA |
| | | | | GATGGTATGTTAGTTACTATGGAACAGGAAAGAAGACTG |
| | | | | ATCACTGATATGATTAAAAAAGATGGAAATTTGTTACCT |
| | | | | AAAAAAGACTAAATTTTTTTGTGTTATAATTCTTGTTGA |
| | | | | TTTGGATTCTCATATTGATTGTTTTTCATGATATGATGA |
| | | | | TGGTAATTGTTTGATACAAACTATATTGAGACTACAAAA |
| | | | | GGAATATATTGTTTTAGTTCATTATTTTTGTGTGATGTG |
| | | | | TACTAATAAGTAAGATTTCACATATGTTTTTGTAGGCTT |
| | | | | ATTGTTTTGTGGATTTCACGAAAGTTGAGTATAATTCGT |
| | | | | TAGATTTCTGATCTTTCTGAACTCGAATCTGGCAACATT |
| | | | | AATCACACGATCAACCACGCCTGCTTGGATACAAGCACC |
| | | | | ATACAGAAAGTAGTATCACGTTGAAAATGTCCATTGTTA |
| | | | | CCACTGCTTTGGGGTTTTGCCTAATGTCCATGTTTTCAT |
| | | | | TTTCGTTTTTTATCGATCTTGAACGAATCTAAAGCTAAC |
| | | | | TTTAGAAAAGAACTGCAGACGCTTAACAAACCAACGTTA |
| | | | | GTTGTTCAAATCGGATCAAAATGAACATTACTGGTTTCA |
| | | | | ACCCGATTCTTTGTAAACAGACATTGCAAAGAGAGTTGA |
| | | | | TCTGTCCAGGTAGCAATTGATATATTTATTATCACTTAA |
| | | | | AATCAATTAAATGATGGTTTAATGTACATATTTTGCAAG |
| | | | | TCAATAAATTATGTGACATTGTCACGAGTACACTACCAA |
| | | | | ACAGTTGGATTTGATGTTGCTTGTGAGTTGTACATAATG |
| | | | | CATTAAAGTATCTTCATTTGGAGATGTCGATTTCCGTTA |
| | | | | TGAAAAACGGTTGGTAAGCTTTTATGTGCAAGTATTTAA |
| | | | | GAGATGTTAACACAATCTTTTGAGTTGTCACTTAAGAGT |
| | | | | GCTAAAGGAGTTTGTATATGGTGGAACTTGTACTATCAA |
| | | | | ATATTAGTTTGTACATATTTTCCCTCAAATTAGTAATTA |
| | | | | AACGTCAATACTTGAATTTGAATACGGGATTTCCTCATC |
| | | | | TCCTCTTTAGACAAAAGTTGTGCTTTTGATCTACGTTTG |
| | | | | TTGCTTGAAAGTCAAAACCATTTTTTGTTGGAGTTGCTA |
| | | | | GGGACTGTTATCATGGGTCGTCATACATAATCAAAAGAT |
| | | | | TGTGATCTAATCGAGATATAAACTTTGTGGTGTTGAATG |
| | | | | AAATGAGCCATTGTTTGTAGAATCTTAGCTTTGTTACCA |
| | | | | TTGAGTAAGATCATCGGATAACAATTTTAGCAAATCTTG |
| | | | | GCCATCTCATTAATATACGAAATACCATTTTTTATGTAA |
| | | | | AATAATTAGTTACTACGTATATGTACTTATCATACAATG |
| | | | | AACTGACAGTAATTAAGTTATAAATTTGATGTAGGTTTA |
| | | | | GGTAAAACCTAAGAAAAGCTATATTGAATGTGCACTTTA |
| | | | | TTATGTCTAGTTCATGAACATTAAAGGAGAGTAACAACC |
| | | | | CTCGAGCATAAATGTGTGTAAAGAACATGGATGCCAAAT |
| | | | | TTACTAATTTAATAATCAATACTGTAAAGGATTATTAGT |
| | | | | ATTATTATTACTATGGGGATGGGAATATAAGGTTGTCGG |
| | | | | GTATCTAAGCTTAGGTGTAGAACACTCACATATTGTTTT |
| | | | | T |
| 60 | Conyza | Genomic | 12729 | CCTTTGGGTAGAGGCAAGATTGTCTACATCTCACCTCCC |
| | canadensis | | | CCATACCCTGCTCACTGTGTTGTTTAGTTTATTTAAAGG |
| | | | | TGGAAAGGAAAGGAGATGAGAGGAGAAATATATAAGATG |
| | | | | CATTCTTAAGATTTTTTTAAGTGTGGAAAGGGAAGGAGT |
| | | | | AGAAAGGATTAGAGGGGGAAGTTGATATGGATCTGCGGG |
| | | | | AAGTTTATATTATTTAGTAATATAATATTAATTTTATTA |
| | | | | TTATTATGATTAGGAAAGTATTGTCTTTACTTAGATATC |
| | | | | TTATGATATCTTTTATATTATTTAGTTAGCTTGATCATC |
| | | | | AAGCTATAGGATTAGTATAAAAAGAATATTAGGGTTGTA |
| | | | | ATTCTAAAGTATGAAATATTAATCAGAAGTTTATTGTTC |
| | | | | TTGTTTAATCAATTTAGGAGTTTACTGGTTCTCGAATAC |
| | | | | CAGCCTATCTTTGTTATTGTTCTTATCATTTGATACAAG |
| | | | | CCATTGGTTCGTATCAATTGGTATCAGAGCATCGATCTT |
| | | | | GCAACCTGTGCTTTTCTTCAACTATGGAATCAAGGACGA |
| | | | | TCATTGATGTTGATGCTGATGTACAGCAATACCGTGAAT |
| | | | | CTACTGAGGCTTGGGTGGACATAATGCATGCTCGGATCA |
| | | | | ATCGTTTTCAAGCAGCCACCGCGCGATCTCAGTTGGCCA |
| | | | | CTCAACAATTTCACTTGAGGTTTACAACTAGGCTGGATA |
| | | | | AACTTGAACCAGTTGTAGTTGGGACACAGCAGAAGTTGG |
| | | | | ATGCATTGGCGGCAGTGGCAAACCAGCCTCTACCCCAGC |
| | | | | AACCGATGATTCAGGAAGTTGTCATACCAACAGTCCCTA |
| | | | | CAACTTCACCAAAAACAAATCAGTTTGGGTTGAAGCAAT |
| | | | | CGAAGGTTTCACAAGCAGGGTATCCTTATCCCAGACACC |
| | | | | TTCAGATCTTGCAAGGAATAATCATCCTGATGTGAACCA |
| | | | | AGAACGAGGAGCTGGACTAACATTCAAGGACATAAGCAA |
| | | | | TGCTTATGAAGATCTGGCAGGCGATGAAAAGCGATCCAT |
| | | | | ATATGACATGAATGGGGAGAATGGGCTTAAAGGTACATG |
| | | | | TTTTGGTTTAAGGAATTGTGCAAAAGCTGATGAACTTTC |
| | | | | TGGTTTGATACATATGATTGAGTTTGTTAAACAACTTCG |
| | | | | ATATGATCAGCAAGCTATGGAGTTTCAAGTCAGAATTTG |
| | | | | GGATCCTGGAATTACTCGAAGGAACAATTTAAAGCAACA |
| | | | | CCTTGAGGACAAGGTGTTTTTGGGGTGGGAGTAATGATA |
| | | | | TGGATCTGCTGGAAGTTTATATTATTTAGTATTATAATA |
| | | | | TTAATTTTATTATTAATATGATTAGGAAAGTATTGTCTT |
| | | | | TACTTAGATATCTTATGATGTCTTTTATATTATTTAGTT |
| | | | | AGCTTGATCATCTAGCTATAGGATTAGTATAAAAAGAAT |
| | | | | ATTAGGGTTGTAATTCTAAAGTATGAAATATTAATCAGA |
| | | | | AGTTTATTGTTCTTGTTTAATCAATTTAGGAGTTTACTG |
| | | | | GTTCTCGAATACCAGCCTATCTTTGTTATTGTTTGATAC |
| | | | | AAGCCATTGGTTCGTATCAGAAGTTTAGTTGTTTTTTGT |
| | | | | CTCAAAAGTTTTCCCCTCATTTTTGAGGTGATTAGGAAG |
| | | | | GAAAACTTCTCTTCCCTCTCATCTCCTTTCCTCCCTTAA |
| | | | | GTTAACTAGACATTAATGAATATTGGGTCATTTTGTTGT |
| | | | | TGTGGCTATAAGGAATGACTTGACTTAAAAACTTATAGA |
| | | | | AATGCTGTGTTATCCAGTAAGTAATCGTTTTTTTACTAT |
| | | | | TTGTCTTTTAAGACCATTCATTAAGCACATAAAACAAAC |
| | | | | AACAATCCTGCTTAATCGATGTAGACTACATACATGTAG |
| | | | | ACGGACATTTTATCCATAAAACAGCTAATTAGTCATACA |
| | | | | TACCAGTTATATGTTTTACATCGTGCAGTGTAAAACTTC |
| | | | | TGCCTTTACTGCTAAGATTTTTTGTTTACATATATATTA |
| | | | | GATATATTAAGGTTTGTATTTTGATGCTAACATTTAACA |
| | | | | TTACTTTTTTTTTTTATCGGGGAGTGGGTTAAAGTGGTT |
| | | | | CTTCTACCTGGTTTTAGTTTTTTAGATGTATATCCAATA |
| | | | | TTTATTGTGGGTAATTTAAAGTTTTGAAATTTTTGTTTT |
| | | | | TTTTTGTGAACAGTATAAAGTTTCTGACTTTTTTGATTT |
| | | | | TTTGTGAGGTAAAGTCGTGAATGTGTAATTTGGTATTTG |
| | | | | ATTGATATTCTTGATATTGGTACATAGTGAGGTGCAAGG |
| | | | | TGCTGATGGTTTCTTAGACGGGTCATGTTTGTTTTGTGT |
| | | | | AAAATACATCTGTTTTTTTCTTTGATAACAAGTTATAGA |
| | | | | AGTTGCACCCAAAAATGTTCTTGTTAAAGCGATAAAAAT |
| | | | | TTGGATAGAAGGTGACGGTTAATGATTCGATATATTGAT |
| | | | | TTGAGTTTCCTTTTATCTATTGCATTTTCACAAGTTCAA |
| | | | | CATTCCACCCTCGATTTTTTGATGAATCTATGACTGAAG |
| | | | | AAAAGGGCGATTGTTGCCTTTGGCAATCAGTTTTGGATT |
| | | | | TTATTTTGTCATGGAAAGGGGGTGTTAGTTCCTGAACCT |
| | | | | TAGTAGAAGATGATAAGCTATAGTTTCAATATTGCTTTT |
| | | | | CTTTCTTGCATCTGAACTGGTTTTGCATTTTTCAAAGGA |
| | | | | CTATAAAAGATGCTATTTATCACCTATGACCTATGTTAT |
| | | | | AAATAGTAAGGTATTAAACTATTAATATTGGTATAGTCT |
| | | | | TGAGAAATCCATGAATTTCGATTGAGTTCATAGGACACA |
| | | | | TCTAACTTATGTTTCTTTACATTACGATTTACACATCTT |
| | | | | GTCTTTGACGTCTGATTTTAAAATAGCGTTTCTATTGAC |
| | | | | ATTATGCATTTCTTTGAGTTCTCTATATAAATTTTTGTA |
| | | | | AGCTTTCCATATGTATATACTATGAATCTGAGTGAACTT |
| | | | | ATGCTATCAGGGGACTACTGTTGTAGACAACTTGTTAAA |
| | | | | CAGTGATGATGTTCATTACATGCTTGGAGCTTTAAGAGC |
| | | | | TCTAGGGTTAAATGTTGAAGAAAATAGTGCAATTAAAAG |
| | | | | AGCAATCGTAGAAGGTTGTGGTGGTGTATTTCCCGTGGG |
| | | | | TAAAGAAGCCAAGGATGAAATCCAGCTTTTTCTTGGAAA |
| | | | | TGCAGGAACAGCTATGCGTCCATTGACTGCTGCCGTTAC |
| | | | | TGCTGCCGGTGGAAACTCAAGGTATTTTAACTTAGTGTT |
| | | | | ATATTCTCCTGCATTTTATGTCTGCTTCATCCTCCTACA |
| | | | | CATACATTTCATGACATGTGTACCCATTTCTCTCACCTC |
| | | | | ATCATTTCATTTTTCTATGTGTCACAATTATATGAGTAG |
| | | | | GAGGATTCATACTTTCATAGGCATAAATTGTAGGAATCA |
| | | | | AATATCGTTTCTTTTTAACCTAACATCTCTTGATTAGCT |
| | | | | ATTATAATCCGTAGAACGTATATTAAAGTTTTTTGTGCC |
| | | | | GATATGTAATTTTAAGGTGAATACACAAATAAAAATTTT |
| | | | | ACCTTTCTGTTTGTTGCATGTTCTGTACATATAAATTTT |
| | | | | TAGTTTTTGTTATATATCTAAGAATCTAAGATCTCTAAA |
| | | | | TATTCTTCTATTAGTTGACACAAATTAAGGGATCACATG |
| | | | | AACTGAAAACTCAATAGCATCCACTTGTTGATAATGCTG |
| | | | | CAATTTAATGCCCAAAGAAGAAATTATTGCAATTCTTAT |
| | | | | TATCATTTTATTTATGGGAGACAGTGAGTATGAATTTGG |
| | | | | GAATCGATAATAGAGTTGACCAACTTGGTGGTGCTGGGT |
| | | | | AGCTAAGGTAGTGGGTAAGTTACATTGATATGTAATACC |
| | | | | CTAACAGTTATGAGTTTTTTCTTCAGCTACATACTAGAT |
| | | | | GGTGTTCCTCGAATGAGGGAGAGGCCAATTGGTGATCTG |
| | | | | GTCACCGGTCTAAAACAGCTTGGTGCAAATGTTGATTGT |
| | | | | TCTCTCGGTACAAACTGCCCACCGGTTCGTGTAGTTGGA |
| | | | | AGTGGAGGCCTTCCTGGTGGAAAGGTAATCAACAATAAG |
| | | | | ATTGCTGCATTTTAAAGTCGTAAGAATTAATTATTTGGT |
| | | | | TCCATATATGATTGGAAAATTTGGTTATTTAAGAAACTA |
| | | | | TTAATTAGTAATGAAATTATAGTTTTTGAATCTTTTTGT |
| | | | | AATCTTCTTTCCCTGGCCTTCTTATTGCAGGTGAAATTG |
| | | | | TCAGGATCTATAAGTAGCCAATACTTGACTTCTTTGCTT |
| | | | | ATGGCGGCTCCTCTTGCACTGGGAGACGTAGAGATAGAA |
| | | | | ATTGTAGATAAATTGATCTCTGTACCATATGTGGAGATG |
| | | | | ACACTTAAGTTGATGGAGCGGTTTGGGGTTTCAGTAGAA |
| | | | | CACAGTGATACTTGGGACAGATTCCATGTCCGAGGCGGT |
| | | | | CAAAAGTACAAGTAAGTTGATCATTTCATAAAAGTCAAT |
| | | | | TTTTACGTGAAGATCGGTCAACATCTATTTTAATCCGAT |
| | | | | AAAATCTCTTTAGGTCACCTGGAAATGCTTATGTGGAAG |
| | | | | GTGATGCTTCAAGTGCGAGTTACTTCTTAGCTGGTGCTG |
| | | | | CCATCACTGGCGGAACTGTCACCGTGGAAGGTTGCGGGA |
| | | | | CAAGCAGTTTACAGGTATTATCCATGTGCCCACCTCAAA |
| | | | | GATATTCAAAAACTAAATTGTTTCTCAAGTATATATTCT |
| | | | | TCTAGTTAATTGCAAATTTTTTTGCCCCATACGTCTACC |
| | | | | CATTCTATAAATTTCGTCCAAAGTTGGTGACTCGGTTCA |
| | | | | ATCGTGTAATAAGTCTCTTTTTTGTTTTTTAGAATTGAC |
| | | | | AATTTATGTCAGTTCTTGGTTATATCAACGATGTGGGAG |
| | | | | TGTATTGTGCACACATTCTAAAAGAAGGACATTTAGTCT |
| | | | | TTTTGCTTTCTTTTTGCCTCAAGATCATCTTCATCTTTT |
| | | | | CAAGATACTCTGCACTCATTTGCATTATCAAAGTTTTGG |
| | | | | ATGCATTCTGTAACTGTGGTACAAGGAGGGAGACATAAT |
| | | | | ATGTCATTAGTTCTTATTCTTAAGCTCAATGCACACTAT |
| | | | | CACCTCTTACTTCTTTTTTCTTTCTTTTTTTTTATTAGT |
| | | | | TTATTTAAGCTCAATGCACACTAACACTTCTTCTTTATA |
| | | | | ACTTCAAGTCATTCATTTTAATTTTTGAAGCTGATGGTT |
| | | | | TTTGACATTAAAGATAGAACTATGTATATACATATGTCA |
| | | | | TTTCATCTTACCTATTTGCATGTCTTGTTGATCTTTAAT |
| | | | | CAGGGTGATGTAAAATTTGCTGAGGTCCTTGGACAAATG |
| | | | | GGTGCTGAAGTAACCTGGACAGAGAACTCTGTCACGGTG |
| | | | | AAGGGTCCGCCAAGGAATTCTTCCGGAAGGGGACACTTG |
| | | | | CGTCCAGTAGATGTGAACATGAACAAAATGCCGGATGTT |
| | | | | GCGATGACTCTTGCTGTGGTTGCCCTTTATGCTGATGGC |
| | | | | CCCACTGCCATTAGAGACGGTATGTGTTAGAATTCACCA |
| | | | | CAGCTTTGTAATGTTAAATATATGTTAGTTTAGATTAAC |
| | | | | AAAATGACTATATGATCACAAAAGGAAACATTTATCTCA |
| | | | | AATTTGGAACTAATATAGTATCATACCTATATAGCAATT |
| | | | | GTAGTTTCAAAGAAATCCTTAAGGTCGTGTTGTTTATTA |
| | | | | TACATGACTGGGTATATATTGTTTTTTGTGCTCAAGCTT |
| | | | | TTAAAAATCACATTTGACTATCCTTTATTGAAAGGTTAA |
| | | | | TTTTGTTCATGTCTCATTTTAGGCAATTTACTTTTTATC |
| | | | | AAGGAAAAAATAGCAATCAATGTCTATGTCGTAGTTTAG |
| | | | | GCAATTAAAACCCATCAATCAAAGTGCTGTTGGTTCAAG |
| | | | | GCATATTAGAGATAAATGAGATAATAGTACGTGGATGTC |
| | | | | TTTTCAAAAGAAGTACAAACTTTTTCTTGGGCTCTTTAG |
| | | | | TTTTTACTGAAAATACCAAACTCCTTTAACTGAATTGTC |
| | | | | TAAAATAGAAGAAACTGGAAATTAGTTGCTATTTTGTGA |
| | | | | AAACGAAAAGTAAATCGCCAAAAATTGGAGGTTAAGTAT |
| | | | | GCTTATATTTTATGTAATTCATCTTTTTGAAAAATGTAA |
| | | | | GAACTTAAATGGAAGTGAATTGATTTGAAAAATATATAT |
| | | | | TAAAGCACCACTTATGAAGAAATCTAGAAATTGAGTTTT |
| | | | | AGGATCTGTAAAGACATCCTGTATATTGTATGAGAATAG |
| | | | | ATATATCGTACACCACAATCCATCATTTTTACTTTTCAC |
| | | | | ACGACAAAGTGAATATGAAAAATGTGAGTTAAAACACTT |
| | | | | AAAAGACAGTTTTGGGTGTGCAAAGTAAAATGTAGCACA |
| | | | | AATTGGCCCCTTTCTCATATTGGGTTTACATATTCTTCT |
| | | | | TTACGTATATCCCTATATTGTTCATTTTGTGGGCCCCAT |
| | | | | CTCACGTCGGTAAATCATTAGATGGACTAAATCATATTC |
| | | | | TTCATTCCTTATATTGGGCAGTGGCTAGCTGGAGAGTAA |
| | | | | AAGAAACGGAAAGGATGATTGCCATCTGCACAGAACTAA |
| | | | | GAAAGGTACAAGTCATTAACCCATCTTACTCTAAAAAAT |
| | | | | AGAATGGCCATGAGTACTTTTAAAGTACTCAATGAATCT |
| | | | | GCCCATTATTTGTTTAGTGCTAATAGGCCCTTTTGCCCT |
| | | | | TGGAACTTTTCAGTTGGGAGCAACAGTCGAAGAAGGTCC |
| | | | | AGATTATTGTGTGATCACTCCACCAGAGAAATTGAATGT |
| | | | | GACAGCAATCGACACATACGATGATCACAGAATGGCCAT |
| | | | | GGCTTTCTCGCTTGCCGCCTGTGCAGAGGTTCCTGTCAC |
| | | | | CATTAAGGACCCGGGTTGCACCCGTAAGACCTTCCCCGA |
| | | | | CTACTTTGAAGTTCTTGAAAGATACACTAAGCATTAAAT |
| | | | | CACATATAAGATGTTCAGAAAGAAAGGGGTTAGAGGTTT |
| | | | | TAAAATGACACCTTTACCCTTCAGTCCTTCACCATTATC |
| | | | | TTTCTTCAGAAATGTTTCACTTACAGAGTTACATCATAT |
| | | | | GTATATGGGCGACCTGAGCGTATTTTATCTTTTCTTTTC |
| | | | | GGTGAGTTTGTAGTTTTTGTTGAGGTGGAATAAGTATTA |
| | | | | TCTTGAATATTTATGCTAAATTTGGTTAGCAATGTATTA |
| | | | | TTTTTGATGCATAATGTATTTGTTATATTATAATGAAAA |
| | | | | GTGTTTTTGAATATGGCCAAGATTTGTGAAGGTGAGATG |
| | | | | AGTTTTGAACCTTATACTCAGATTTAGCACATGGTGACA |
| | | | | CTAAATAATTGATCCTTTATTAGTGCTGAAAATAATTAT |
| | | | | ATGTTAAGAAAGATTGGTTACTAACAAAAGTGGTTATGA |
| | | | | GTGAAAGTGGGGTTTAAGTTTGAAGTCATAATTCTCTTG |
| | | | | AGATGTTGATTTGAAGTTGAGATGTACGATAGGGGTGTA |
| | | | | AAGGCACCTTTGGGATATAAACAAAATCATGGATTATCT |
| | | | | TATTCCTTATACTTCTATTGTATGTTAATTTTTAATTCA |
| | | | | ATTTTACTGAATTACTTAAATGATATTTTGAATACTATA |
| | | | | AAAGGTTGGTATTACTCCATATGTTATATGAGTCAGAAA |
| | | | | TACATTTCGTAATTTGCTCTACATTATCTTAAGTAATAT |
| | | | | TTCTCTTCTAAATCCAAATTACTAGTTAATAATATATAC |
| | | | | TAGTAAAAATGTAGCTATAAGCCTATAACTAAAACCTGA |
| | | | | AAAATGAAAAAGAAAATAAACGCTATATAAATTATGGAT |
| | | | | TCATGCATGTATCTATTATATAAATAAAAGAAAATTGTG |
| | | | | ATGACATCATATTTATTAGAAAAAAATCTACTTGGCATC |
| | | | | ATTAGACATTCACATATTAATTATTTATTTTTTTTATTT |
| | | | | AATTGATTTATGACATCAATATAAATAAATAGAATTTGA |
| | | | | TAATTCTATATTAGGAAATATCATTACTTTTAAAGATTT |
| | | | | TGTGGCACTATTACTCTATTAGACATTTATATAATAATA |
| | | | | CTTTCTTTTTTTATTTAATTGATTTATTTATAAATAACT |
| | | | | AAACTTTAATTTTTAATTCCCATATTAGAAAATATCTTT |
| | | | | AGTTTTAAAGATTTTTGTGTGGTAACGGTTATAACTTAA |
| | | | | ATGTTCATAGAGTATTATAAATGAATATGAAAGGTCTTA |
| | | | | CACATTTTAATTCTTATATAGATTGTATATGTGTTTATA |
| | | | | AAAAAAATCACATTTTGTACAATATCTTGAAGTTTTTCT |
| | | | | TGAATTTTATTAAATTTTGTGTTATATATCAATGGGTTG |
| | | | | AATGTTAAATAAATTTTCATTATATAATTTTAGGTAAAT |
| | | | | TTTACATTATATAATTGTCCTCAATAATTATTTCTTTAG |
| | | | | TTTGCCCGCGTAATACGCGGGTTACTTAGCTAGTCAAGT |
| | | | | GATAAAGTTCCATTTAGGTAAAAACTAAAAAACATGATA |
| | | | | GAAGAGTTTACGTTAATTGTATTATTTATCTAAAAATTC |
| | | | | TATTTTTAGTTTCGTAAGTTTAGACTGATCGATCATCTT |
| | | | | GCAACTCGATGTTATACATGGCATTTTATCTTAAAAACT |
| | | | | TTTACCCTTGTATTTTTTTTTTTTTTTTTATTGTTTTTC |
| | | | | TTTAAACATTCATATCTATAATCATGAAAAGAAATAAAA |
| | | | | TAAGAATTAGCGATAAGCCAGATAAATACAAAAGGAGAA |
| | | | | ATTTAAGTACAAATGAAATTTTATTTCATCTTATGGTAC |
| | | | | AATGTAATAAAAAGTTATAGGAAAATTTAACTTCAGTCC |
| | | | | TAAGATTGTTGTTAGCGTGAATAAATAATTATACTTTTT |
| | | | | ATTTTAAAATTAGTTTGAGCGCGTTAAGTCGTTATTGGC |
| | | | | AACCCATAGAGTTGTTATTAGCAATACTAAATTTTTTAA |
| | | | | TTGTGGATAGCCAAAATTAAATGGATGGGAATTTCCAAT |
| | | | | GACACACCGGTCTAGTGTTAAGACACATGAGATTTTCTT |
| | | | | ATAAGTCGGAAGTTCGAGTCTTGTCAAGTACAAGCTTTA |
| | | | | TTCATATTAATCCCCAAGTAGTCTATGGTGATTTCTTTT |
| | | | | GGCATTGTTGCTCGGCACGGGGTAGTAGGATCCGGTTTA |
| | | | | GACAACCGACCAACCGCTTTTTGGGTTAGGACCTCATCA |
| | | | | TTTGATGGTGAAGGATATGTTTCTATTCGAAAGTCATTT |
| | | | | GTTAAAAAATAATAAAAATGAATAAATGAACGGAAATTA |
| | | | | TATGCACCATAACCTTAGAATATACTACCAATATTCCAG |
| | | | | GTTTATACTTGTGACTTGCCAACATTTATTGTTGTTGAT |
| | | | | TGTAATAATGCTCATGTTTCCTTCATTCTTCTTGTATAG |
| | | | | TTCCTTGAAAAAATTTCTTGTTGTTGATTGTAACTACAA |
| | | | | TGATTAATGTAGAAGAAACAATGGTTAAAAAAAAAATGA |
| | | | | TATTTGTACCATTTCTTTTGATTGATGTATCATAAATGT |
| | | | | GCATTGTTAACTTGTACAGTTAGTTATACAATTTGTACA |
| | | | | TTATTATACATTAATAAAAAATAGTGATACTAATATCAC |
| | | | | AAATTAAGCGTTAAAACAGTGTGGGGTGGGGTCTAAAAG |
| | | | | ACTAACTCAGTAATTTATGATACTTGGAAATTACTCTTT |
| | | | | TCCCAATTAAGCTTGCAATAAGTTGAAGTTTGGTGGTGT |
| | | | | AGTAGCCAGCCTTTTTACTCTTTTCACATATATACAAAC |
| | | | | TCACATGATGTAGGTGCTACCCTAACCAACAAAGTTGGG |
| | | | | GAATTTTGACAATAAAGGCATTGAGTGTTTACCTAATTT |
| | | | | ACAGTCAAAATCTTGACACATATGACATATATACATTAT |
| | | | | GGCAAGAAAAAACAAATATATCCTAAGTTTAGACCAACA |
| | | | | CCATGTTGTTTTAAAATGATATTAAATATGTAAGTTATA |
| | | | | TACATTTCTACTTATTGGTTTTAGTGGTTTATTTCTATA |
| | | | | TTTGCTATAAAAGTATAAATTATGGTTTTCCAATATGTT |
| | | | | TTGTTTAGAGCTTTAGCCGTTGAATTCATGGAAGAATGA |
| | | | | CATTTTGGGGTAAGTTATTGACATGAACGGGCTAACACC |
| | | | | TTAGAAAAAATTATTGAAGTATTTATAGATGTGTGTAAT |
| | | | | AACTCGAAGACATGTATCAATGTCAATAAATAAGGTAAC |
| | | | | GAGAGGAAAAATAAACTTATGCATCAACGAATAAATGAA |
| | | | | TTAGGTATTAAGATATGATAAAATTGACATGATGTTTAC |
| | | | | TCTCTTTTCTTTTTTTCCAAAAAAAAAAAATTATCGTTC |
| | | | | ATCTTGAATTAATTAGTTAGTTTTTTTTTTTTTTTTTTT |
| | | | | GAAAAGTAATTAATTAGTTACTATCACAAAGAGTGTTGA |
| | | | | AAAAGCCCTCATTCAAATGATTATTCCAATTCAGGAAAA |
| | | | | TCTTAACACAAAGTACACAACTAAAAAGAGGACATTAAT |
| | | | | CAAAACATCATACTCAAAACATTTGATAGTGAACAATAG |
| | | | | ATCAATTGGCTGGAGTTTTTTTTTTTTTTTTTTTTTTTC |
| | | | | CTGATCATAAGTTTGACTCTTCAAAATGACATACTTTTA |
| | | | | GGTTTTCTTTTGACTAACTTATAACAGCTTATGATTTAC |
| | | | | ATCTTGTAATTTAAAGTATGTGTAGGGATTCACCATTGT |
| | | | | ATGATGAGATATCCCCTGATATCAAATAACAACTGACTC |
| | | | | TTGAAGAAAAACATACTAATCGAAACCAAAAAAAAAAAA |
| | | | | AGAACGCCAAAGTTGTAGATGGAGTTGTTCATAAGCTTA |
| | | | | AATTCCTCTTGATCCAGTGGGTATCTTTGGTGCACCACG |
| | | | | TGAATGCTGATTTCCTCTTGAAGTTATTAAGCTTGTAAT |
| | | | | GACAACAACTATGGTTTAAAATGATTCTAGAAGTTAAAT |
| | | | | ACTACGAGGTAGACATTTTTTCATCATTTGTTAGATAGG |
| | | | | CGCATTTTGAAGATCGTTCAAGTCGTCTTCAAAAACGTC |
| | | | | CTTTTTACCTAATGATCAATCAAGGCACGCACCTAGCTA |
| | | | | TGAGATGAATACGTTGTTGATATTCCGCTTTTCGTTATC |
| | | | | ACCATTCATCTCGACACGACGTATATATCTATATATATC |
| | | | | CCAACTCTAGATTATATTCATAAGTTCGTATATTGATGA |
| | | | | ACTATATATGTGTTATGCACATGCAATGCACCCATAACA |
| | | | | TGGAAGAAGAATTATTGCTTTATTCATTCATGTGGAAAA |
| | | | | TTAGGTATAATGGAATACAATGAAGGAACATGACAAAGG |
| | | | | TGTTACCCAATCACTAAAATTGTGTTTGGCACTAATGGA |
| | | | | GCATTGCAATTGTACTTTCTAAATAATCCATATCTTTAA |
| | | | | TGGATGGAAAGTTTCATACTTACTTATTACAATCAGTAG |
| | | | | ATAACCATAAAAATGACATTAATATTGACCTTTAATTAA |
| | | | | TAGAATTTTAGAGTTTTTAACAAATCTTTTGTCATGGAC |
| | | | | TTCGTATGTAAATTGGGGAAATGCAATTTGTCTTCTATG |
| | | | | CAAAATACGAAACCAATTAGATCCAAAAGGTATGATGAT |
| | | | | AGTAACATCAATCAATACTCATTTATAAAAGAAGGTTTC |
| | | | | CTTTCATTTTCAATTTTTGTGTGCTCTTAATATAAACCT |
| | | | | CACACTAAAAATGACTTATCCCATACTCACATGACATGT |
| | | | | CTCTTAACTTCCCTTTCAATTAGCTTTTTTTTTCTTCCA |
| | | | | CTCCTTTATTGCACATCTAAAATTAATTTTTAAAAATAT |
| | | | | GACTAATGACTTTTAATCAATTATGGGACTAGTTAACTT |
| | | | | ATTAAAAAAGTATCCCCTTATTGAAAGTTACATAGAGAA |
| | | | | ATGTTTAAATTACTCTCCAAATTTAATTATATAATATTT |
| | | | | TCATCTAGCACCCCTTAAAATATATTCACATAAACTATC |
| | | | | CCCTTAACATTAATGATTAAGTTACACTATCAATCGTTA |
| | | | | ATCTTTTAGAATATCTTCATTAACCCTAGCTATAAATAA |
| | | | | ATTACTTTTATATCAATTATTTACACCACTTAGCGTCAC |
| | | | | TTCCACCACCAACAGTTGTCCCATCATCACACCGTCACC |
| | | | | GCCACAACCACTGCTGCATTGCGTGGATATAATGCTACT |
| | | | | ATAAATAATAAATAGTAAGCTTGTAAGGAAAAAGAGTGC |
| | | | | CTCAAATACTTTTCTTATAACCCATTTGCAAAAATAATG |
| | | | | GATATCTTAGAATGGCTAAGGAATAACTTATAGCATATT |
| | | | | TTTTAAAAAAAAATAACACTTTATATTTGGAAGTGTTGA |
| | | | | AAAATATGTAATATTTTTATTTAACACGCCTTAAAATAT |
| | | | | TTTTACATACACTATCCGTTAACATTAGTGATTAAATTA |
| | | | | CACTATCAATCCTTTATTTTTTAAAATATCTCCATTAAC |
| | | | | TCTTTACATCAATTATCTACACCACTCGACGTCGCCTTC |
| | | | | ACTACCAACTATCGCCACCACCACACTGTCATCGTCACG |
| | | | | ATTACCGCCGCATTACGCAGGTACCATGCTAGTTGAATT |
| | | | | TAACTATAATAACTATGAAGTGAAGTTGAATTAATCAAA |
| | | | | GTTATGAAAGACGAAAAAACTTCACTCACTAAAAACAAT |
| | | | | AGAAACCTTATTCTTTTTACAAGTGAATTTTACCTCAAA |
| | | | | CGTGTATGATGTATGCAAATCGCACAACGAATGGGTCCC |
| | | | | GCACTAAGCGGATCTTAAATAGTTTTTCTCACCATAACA |
| | | | | CCTCCTTAATTAGAAAATATCGTCGAGGAGAACCTACCA |
| | | | | AAACTCGAACTCAAGATCTTGGAATAAATTCTCCGGAGG |
| | | | | CCCCGCATAGCAGGTTTAGTGAAACACCACTGGCCATAA |
| | | | | ACGAAATGTAAATAATTTATTTCAAATCGTATAAATTAG |
| | | | | AAAAAGCAACACGTTTGGCAAAGTTTCATTTCCCTGGTA |
| | | | | TTATTTATAAGTTTTCATTAATATTCCAACAACTAAAAA |
| | | | | TGGTAATGATGAGGAGTTATCAACGAATGTCAAAACTAA |
| | | | | ATTCATTTGTATACTCACAATCAAATATTAATCAAAACA |
| | | | | AATCTTTAATATTATATATCATCACTAGAAACTAGAAAG |
| | | | | TAAACATATAAAATTGAGTGGTAGATTATGAAATATTAT |
| | | | | ATAATAACGACCAGTTAAAAAGGTTATAACTAAAGGGTT |
| | | | | GTGATCAAATGAATC |
| 61 | Conyza | Genomic | 2833 | AATCTAATAAAAAGAAATTTGTAAGGAATTTGTAAGCGG |
| | canadensis | | | AAAGTCCCCTTTGTCCATTTTGTAAAGACAATGAGGAAA |
| | | | | CAATTGACTATCTTCTTACTGCTTGTCCCATTGCAAATG |
| | | | | TGGTATTATGTTTCCTCATGGTGCCATATACCTCCACTA |
| | | | | TAGGCATACTAGGCCAAAGAGTTTTTCCTTACAAACCAG |
| | | | | CTTTCTCCCGAGGTCTCATTAACTAAACTTAGAATCATT |
| | | | | AATCTTATCATCCTCTCATCTGGTTGGCATATTTGAAAA |
| | | | | ACTCGGAAAGATAAAGTCTTTTATTGTAAAGATCTAAAC |
| | | | | CCAAATTCGAAGACATAAACATTCAACACTCATATGGTT |
| | | | | AACTGTGAGATCAAAGTTTAAGGAGCTCGACTCGAACTC |
| | | | | CTGGAGCTCCTTTAATTGTAATACGGTAACTTATTTTGA |
| | | | | CTTTGGTTTTGCTTGTACTTTCCTAGGACAAGGAGCCTA |
| | | | | AATTTTGATTGGAGAAAGAGATACAGTGAGAGTAGGTAT |
| | | | | GTATTTTCTAAAAGACACGTAAACCTCAAAAAGAGCGTG |
| | | | | TGGTAATGATAGGGATTCTTATAACTTATTTTGACATTT |
| | | | | TGTAAAAAAAAATATTTAAAAAGAAAGATTAATTGTCGA |
| | | | | ACCTCATGACAGACCTAAAAAACCAAAACTATATCCAAC |
| | | | | TAATCTAAAACCTTATTTGTTCCATAATCGGTAAACGTT |
| | | | | CTATCAATAGTGTTTATATGAAGTATACAAAGTTAAGCA |
| | | | | TTGCCATTGCCACTAATGATATAACAATCTTAACCATTA |
| | | | | ATTTTCATTCAATGGTCAAGATATTTTCAACATGACGCA |
| | | | | AGTTGAGAAATCAACTTGAGGGAATTTAAATTCCGTAAA |
| | | | | CTCAGCTTTATGTAGAACAAGGTGCTGATAACGTGTGAT |
| | | | | AAGATTATTGTGAAGAGAAATATAGAGAGGAAGAAATTG |
| | | | | TATCTTTCATTGAGAATGGGGAGGGATATATATACACAA |
| | | | | GTCTTGGAGTAGGCTCCAAGATAAATGAGATAAACTAGA |
| | | | | AAATGTAATCTCTCTAAAACATACATGATACACATAATC |
| | | | | ATTTTCATTTACAATAATTCCTTTAATAATAGTCATTGA |
| | | | | AATTAATAGTGTCATCTCCATTGAATGTTTGACACCTGT |
| | | | | AAAAAAAAACGTTATATATTAATCATATACAAAAATTAA |
| | | | | ACAAAATGTGACTTTTGGAAGGAGTGGCTAGAACACATG |
| | | | | CTAATGTTTGAGAGATTGAGTGTTCGAATTTAGGCTGCG |
| | | | | TTTTTTTATATGACCTATAAGTTTTATACTTTTATAAGA |
| | | | | TAAACACATATACACTTTGTAATATTTTTTTCTTTTTAG |
| | | | | TAACATTTTTGTTCGTTTATTAAATATTTGTCTAACTAC |
| | | | | TGTATTTCTTTTTTACATTTTGTTTTACTTTATAGTAGG |
| | | | | TAATTTTATTTTTAATACTTTGTTTTCTTGGGATTTTTA |
| | | | | GGAATACACATATGGTATAGTTGTGACAAATGTATTTGT |
| | | | | ATTGATGTAAAGGTTACATTTGATCAAATGTATAGTTGT |
| | | | | GACAATATTTAAACATGAGAAAACTACGGCGGTGAATTT |
| | | | | GTCTACTTTAAAAATATGGGTTAGTGGGGCGCGGTCAAT |
| | | | | CTTTCTAGTTTAAAAATATGGGTTGGTAAGATGTGTAGC |
| | | | | GGGGGCGGGGGTTGGTGAAGGAAATGACACTCTTCTAAA |
| | | | | AGCCGCCTACCAAACTCCCCCACCATCACCTCATCACCC |
| | | | | ACCTATTCATTGATTCAAATCCCACATTTACTACGTGTT |
| | | | | TTCTCAACCAAAATCCCCCCCGCCCCCCCACAAAACACA |
| | | | | CAATGGCAGTTCACATCAACAACTCCAACATACCCATTT |
| | | | | TCAACACTTCCAATCTCACAACCCAAAACCCATCTTCAA |
| | | | | AGTCATCATCTTTTTTATCTTTTGGATCCAACTTCAAAA |
| | | | | ACCCATTAAAAAACAATAATAACAATAATTATACCTCTG |
| | | | | TTTCTTGTAATGTGAAAAACAACAAAAACCCATTTAAAG |
| | | | | TATCAGCTTTCTCTGCCACTTCCACCAAAGAGAAGCCAT |
| | | | | CTAAAGCTCCAGAAGAAATTGTGTTGAAACCCATTCAAG |
| | | | | AAATTTCGGGTACGGTCCATTTACCCGGATCCAAGTCTT |
| | | | | TGTCTAATCGGATCCTCCTTCTTGCTGCCCTGTCTGAGG |
| | | | | TATCTTTTATAAATTATGTTTTGAATATTTGAATTTAAT |
| | | | | TAGTGTTTTGATTGATTGACTAGAATTTGATTATTATTA |
| | | | | AGATATAGGAAAAGATATGTACATTAGTTTTTGACTGAA |
| | | | | TGTGAAAAATGTCTTAATGTAGTAACTCACAAAGTTTTG |
| | | | | TTTGTGATCTATAAGTTTACTTTATAAGGTTACTCTATG |
| | | | | GGAAAAGGTTACGTAGATTTTGGTTTTCTTTGACCTCTG |
| | | | | TAGTTGGTATGGCCATGAGAAGAAGTAGGCCTAAAAAGA |
| | | | | GCTTTGCTTGTGAGAGGACATGACCATACTTAGAGGACT |
| | | | | AGGATTAGTTTAGAGGAATATGGTAGATCAGTAATCCTT |
| | | | | TTAGGTATTTTAGGGGTAGTCTATATACTTATATGTAGG |
| | | | | AAGGTCAGGCATGATACCTTTCTTATATGCTCGTATACT |
| | | | | CGTAATTGTTGCTCTCAGTCCATTTGCTTGGTTTTATGC |
| | | | | AAACGGTTATGTTTATTATGTTTTTATGCTGATGTCTAA |
| | | | | TATGTTCAAATGTCCTATCTACTATGTATTGTCCATTTT |
| | | | | GCGCTAAAGTGTCCTACGTGGTATGTTTGCTACTCCCCT |
| | | | | TTACTCTTAACGTAGGCAGCTCATACCCGACCGACAAGT |
| | | | | ATGGTTTGCTTAACTCTTTACACTCTCCTACTTTTGCAT |
| | | | | CATATGGCCGGAGGTCCTTATGGAA |
| 62 | Conyza | Genomic | 15010 | AATATCAACAAAATCTTTCACCATGTCAAACAACGAAAA |
| | canadensis | | | CCAAAGTAACGACCTTTGGAATCACTTTCAAGAAAACCC |
| | | | | GATGCTGAGTATGCCCCTGATGCCGCCTATACCGGTTAT |
| | | | | ATCATCAGCTAACCAAGGCCAAACAAGCCATGTTTCAGG |
| | | | | CTCATCCAACCCGACCCCAATGGGGAGACCAGTTCCGAC |
| | | | | GGGTTTGTCGCAATACGACCTAGAAGCACATATGAGTTA |
| | | | | TCGCCAACACTTGCAACAGAACTATGCAAGCTCGTTTTA |
| | | | | TGCACCACCGGCGGCACCGGGGCCACAACCGGGTCCTAG |
| | | | | CCACGACCCGGAAGAGGACGAGGATGACCAGACCGCCGA |
| | | | | CGGCGAGTAGTTTTTTTAAAATACTCGTAATGTTTTATT |
| | | | | TTTCTTTGCAATGTTTTATTTTTAAGTGTGTTATGTGTT |
| | | | | TTATTTTTAGTGGTAATGTTTAATTGTAATGTTTTTTTA |
| | | | | ATTTAGTTGTAATGGTTAATTTTTAATAAAATTAAGTAG |
| | | | | TTTTTTAAGTTTGTGTAAATATAAAATAAAAAAAATAAA |
| | | | | AAGTGTGGAAGAGGGGTTATAGGGAGTGATTGTGGAAGA |
| | | | | GGTGGATGAAGAAAGAGAAAAGCTGACGTGACAGTGTGG |
| | | | | AAGAGGGTAAGGATGAGGTGCTATAGGGAGAGGTCTTAT |
| | | | | TGAGTTATAATGATGTCAATGGCTTAATAACTTAATGAC |
| | | | | ATTTTGGTGATGCGTAAGACCTTAAGACCAGAAAGTCTA |
| | | | | AGTTTGAATCTTATAAAATAGGTTTTTTTCTATTTTCCA |
| | | | | AATTTATTGAGTTTTCTCATGAGTTCATGTATGAGCATT |
| | | | | ATTGCATAGTGAAAATATGGTCAGATGGTTTCATCGATG |
| | | | | ACAAGCTAATTTTTAAGAAAGATATATTACTTTTCTTTT |
| | | | | TAACTTGGGAAAATCATAAAAGTGAAATCATCGTTTTAA |
| | | | | CTTTTTACGAGCATGGTACTCGCGTAATGCAGCGGCGGT |
| | | | | GGTATAGAAGACGGTCTAATGGTGGCAGTGTCAAGTGGT |
| | | | | GTAGGTCTATGTGCACCGAAACTCCAAACTGACATAGCC |
| | | | | GTACCCATTTCCGAAACTCCATGGAAACGTTTTCTCTTA |
| | | | | CGAAACACGTATGAAACATTCCCTAAAATTTTCTATAGA |
| | | | | TTAAACGTTTCTTTGAAGTTTCCATACGGTTTCTAATTA |
| | | | | ATATCAAGGTTTTAAAGGACTTTTTCGAATCCCCAAACC |
| | | | | CAAACATGTTATATTATATACAATTTGATCAACATTAAA |
| | | | | TTTTTTATATTACAAAGCCATTATTAAACACTAAACATT |
| | | | | CAATGAGTGATCACTAATCAAACATGTATTATAAAGTTC |
| | | | | TACATATATAATTATACATAATCTCTCAAGTCTCAAATC |
| | | | | TCCTTTATGAAAAAATTGATATAATTTATATTTGTATAT |
| | | | | TTTTTTTATTGTTGTACCCGTATCCTGGATTTTTTAGTT |
| | | | | TTACTGTTCCCCGTTCCCGTATTGTTCCCGTACCCTTTT |
| | | | | CCCGTACCTGTTTCGGTGCTACATAGGTGTAGGTTGATG |
| | | | | TAATTGTGAGAGTGAAAATTTTTAGAAGACAAGAGTTTA |
| | | | | AAGTGTTAATTAGTAAAATAAAAGTTTAGAATGTAAATT |
| | | | | AATTCATTAAGGTCAAATTTGGTATTTTATAAAACTCTT |
| | | | | TTCATAATGGGTGTTTATTAAGAGACAATTTAGTAATTT |
| | | | | TATATGTGACATATGAGTAACTATTTTTATTTTGAGAGG |
| | | | | GGTGCATAATTTTTATTCGAAGAGTACGGATAAAAGTCA |
| | | | | ATAAATTACGAGCAGTGAAGTATCCCAGACACCCCTTGC |
| | | | | AAGGTAATTTTTTAAAATTTTATTCATGGAGGTTTGGTA |
| | | | | GGAAGTGGTGGTGGTGGTGGTTGGTATGAAATTTTGTTT |
| | | | | TTGACCTTCTTCAAACATCCACCTACTACTGACCCCTCC |
| | | | | CTTCAAACCCAACCCAAAATCCAAATCATTAAATCCTTC |
| | | | | AAACCCACTGTGTGTTTTGTGTGAAATTTCACACACAAC |
| | | | | AAACAATGGCAGCTACTCACATTAACACCACCAACATTG |
| | | | | CCCACAATCTCCAAGCTACCACCAGTCTTTCCAAAACCC |
| | | | | AAACCCCATCAATAAAGTCACAACCTTTTTTATCTTTTG |
| | | | | GGCCAAAACACAAAAACCCGATTGCCCATTTCTCTGTTT |
| | | | | CTTCTAATAATAATAGAAATCTTGGAAAAAAATGTTTAA |
| | | | | TAGTTTCTGCCGTTGCCACCACCGAGAAACCGTCAACGG |
| | | | | TGCCGGAAATTGTGTTACAACCCATTAAAGAAATCTCGG |
| | | | | GTACGGTTAATTTACCCGGGTCCAAGTCGTTGTCTAATC |
| | | | | GGATCCTCCTCCTTGCTGCGCTTGCTGAGGTATAGTTTA |
| | | | | ATTTGGTAATAATGTTTGACCTTTAAAATTTGACATTTG |
| | | | | GGCTACATGATTGATATGGGTCTTGAATGAATTGTGTTA |
| | | | | TAAAATTTGGGAAGTTAAATGTTAATAATAGTTTAATCC |
| | | | | TTTAGAAATTATGAAGTAATGGTTTTAGACCCTGAATTT |
| | | | | TTTTTTATTGCATAGGTTAGTCCCTTAGCTAGTTAGCTT |
| | | | | TTGGTTGACATCTTAGAAAAACCAGTACAGTTTTTATAT |
| | | | | TTTAGTCCTTAAGCTTCAATTTTTTGCAATGTATTGCCA |
| | | | | TTTGAAATGATCTAGTAAAATGTTCAAAATCAATGAATT |
| | | | | GGCGGTTTAAAGATATAATGCTTGGATCAATTGTTATGT |
| | | | | AAAGTGTGCTAGGCGGTCAAAAGCGAATCTTGGATCAAG |
| | | | | GAAGTCGTAGAATACTATTGATTTCATATTATTGATTTC |
| | | | | TTATTATGCATATTTGACATGTGCTTCTAACATCATGGC |
| | | | | ATTTGGGATTTATTTCTATATATAAAGCATGACTGTATG |
| | | | | GTTATAAAGTTCAAAACTTGTATGGTATAAATATACTCT |
| | | | | TCTTACTTCTTAGCAGGAATGTGTTGACTTATAAGCTGA |
| | | | | AAACTTTTATAACTCCAATTGTGTGTAGTAATACTTGAA |
| | | | | AGTGGCTGAGTTCCTAGGACAGTATTACATGCGAACACT |
| | | | | ACAACGTGTTACTAAATTTGAGATAGGTATGATTTGGTT |
| | | | | TTGTTGGATACAAAGTCTAGGTCAGTTAACATAGCCAGT |
| | | | | TGAGGACGATAGCTTTCTTGTCTTATTTCCTTTTTATAG |
| | | | | AGGGTTTGTGTTTCGTGATGGTAATATTGAGTACCACCA |
| | | | | TATAGTTCACAAGTCATATAATAAAATCAGAGCAACATT |
| | | | | CGAGGAGTCGCCTATATGCATATTATTGCACCATGCTAA |
| | | | | AATCCAAGGGCATATTTTGATGCCAATTTGTAATTTATT |
| | | | | TCTCAGGGAACGACCATTGTTGACAACTTACTCAACAGT |
| | | | | GATGATGTTCATTACATGCTTGGAGCTTTAAGAACTCTA |
| | | | | GGGCTAAACGTTGAGGAGGATGTTGCAATTAAAAGGGCA |
| | | | | ATTGTGGAAGGTTGTGGCGGTGTGTTTCCTGTGGGTAAA |
| | | | | GAAGCTAAAGATGACATACAGCTTTTTCTTGGGAATGCA |
| | | | | GGAACTGCTATGCGTCCATTGACTGCCGCAGTTACTGCT |
| | | | | GCTGGTGGTAATTCAAGGTATTTGGACGTTGTCATTGAC |
| | | | | TCATTGCTATAGTAAATATATGTTGACTTGTGCACACAA |
| | | | | GATTTGAAGCATCTTTTAAACATATATGATTAGATACAG |
| | | | | AGAACACTGCATGTTGAAAACTTGAAATACAGGACTTTC |
| | | | | TTAAAATATTGGGATTTCACATATATGGGTTGAATAGTT |
| | | | | GAAATTTCCTCCTTCTACCTTTAACCAATTGTATATTAC |
| | | | | TTATTTAAAGTTGTGTTTTAAACATGGCGATATGATTAG |
| | | | | ATACAGAGAACACTACTTATTGAAAGGTTTATGTGGTAT |
| | | | | AGTATGAATTTTAACCTCAAAAAGGGTATCTCACTATCT |
| | | | | CTTCATATAGAAGCACACATCTGATTCTGTTATATCTTT |
| | | | | ATGGATCATTTTTTCCAGCTACATACTAGATGGCGTTCC |
| | | | | TCGTATGAGAGAGAGACCAATAGGTGATTTGGTCACGGG |
| | | | | TCTTAAGCAGCTTGGGGCAGATGTTGACTGTTCTCTCGG |
| | | | | GACGAACTGCCCTCCCGTGCGTGTAGTTGGTGGAGGTGG |
| | | | | TCTCCCTGGAGGAAAGGTATTGTGTTTTCATTAGTAGTT |
| | | | | GTTTTCTATGCAAATAGCAACACACCTTATATATCATCC |
| | | | | ATTTATAGCTATTTTTCTAATTGGGGCGTACGTTACTGT |
| | | | | AATTTGATCGTCCAACCAGTTGTCATGACCCTCCTTAGC |
| | | | | TAAAATGGATGAAAGCTGGTCCGACAATTGACCATAATA |
| | | | | AATGGGTGTGGGCTATCTTGCTAAATTTAAGTATTTCAC |
| | | | | TTAAAATGAGAGTTGGTTTACAGTGTGCATTCAACCTAA |
| | | | | TTTTTTTTTTTAACGTCGCATACAACCTAAAATTGAATA |
| | | | | ATGTTGTAGACACAAAAGCTCTTAGTGAGCTTTAATAGT |
| | | | | AACATTAGAGGTGGTGATATCAATCAAACAATAAGGGAA |
| | | | | AAGTAATATGTATAAAAATTAGAATTAAACAAGAAGTTT |
| | | | | TAAAAAATAGATCAAATGGTTTGAAAGTCTTCTAAAGTG |
| | | | | TAATTTAATGCATAAATCTTCCTAAATTATTTTATTTAA |
| | | | | AAACTGTATTGTAATATAATTTTCATCATCATATTTGAC |
| | | | | ATTCTATGAAAACAAATATACATTTTGAACAAACAGTGT |
| | | | | TACGGATCGACCCAGGCAATTCAAAGCTGTCCATTCTAA |
| | | | | CCTAAACCAGTTTTCACGGTTACCTCTATTTTCCTGCCT |
| | | | | TTCAATTTGCCAGCTACAAGAAGCTTCATTCCACCATAA |
| | | | | CGGGTTCACGCTAAAGATGCAAAGAGTCATGATTCGTTA |
| | | | | TTTATTATCTTGACTTATTATGATAACAATAGTTTTGGT |
| | | | | GTATTTTGATGTCTTCAGGTTAAGTTGTCGGGATCTATT |
| | | | | AGTAGTCAATACCTTACTGCTCTGCTTATGGCTTCTCCC |
| | | | | CTTGCCCTTGGGGACGTGGAAATTGAAATCATAGATAAA |
| | | | | CTAATTTCCATACCATATGTCGAGATGACACTGAAATTA |
| | | | | ATGGAACGGTTCGGCGTCTCGGTAGAACATAGTGATAGT |
| | | | | TGGGACCAGTTCTTTATTCGAGGCGGCCAAAAGTACAAG |
| | | | | TAAGTCTATTTCTTTCTTTTTAAAGTAAAACTGGAATTT |
| | | | | AAAAAGGTTGCAGTTTCTACCCTATCTCTTGTAATGGGT |
| | | | | TGATTCAGGTTATGTATAATCTCTAATGGGTCAAAGGGG |
| | | | | GTAAAATACAAAAAGGTTATTTTGTCACCAAAACGATAT |
| | | | | GATGCATATTACCTAGTTTTCTTATTGGAATAGTAAACA |
| | | | | TTTTTAATCATTTCAATGTACAACTCTTTTATGTGTCCA |
| | | | | CAGAAATTAAACATAGCCCCTAGGACTATGTTCATCATT |
| | | | | TCCCTTTATAAACTAGTTGGAGAAAAGTATTTTGGCCAA |
| | | | | CCCATTCCGAATTTACACATTTTGGCCTATCACCCAGCC |
| | | | | CGTCTGTCCACTCATTTTCAGGGTTTTGTATGGAGACCC |
| | | | | GTTTGTTAATTAGTTGGATTAATTATCTTCAGGTCACCT |
| | | | | GGAAATGCTTATGTAGAAGGTGATGCGTCAAGTGCGAGT |
| | | | | TACTTCTTGGCTGGTGCTGCCATAACCGGAGGCACCATC |
| | | | | ACCGTTGAAGGCTGCGGAACAAGTAGTCTGCAGGTGCAC |
| | | | | TTTGACCTCCTTTGTTTTTTATTCTTCTCGATTTCAATC |
| | | | | AAACGGCTTTACGGTTTTACATTTTAAATGGATTTTGTG |
| | | | | GAAACAACGAGTATTAAAAGTTCATCAAAAGATTTTATT |
| | | | | ATTATTTTTATGCAACAATTATCAGCATCTGTAGTGAAA |
| | | | | TATTCAGAAGTCCGTTTTTAGTTCAAAGTTTTTCTTTTT |
| | | | | AACCTTAAAGTCAAAAGTGAGATGGCAAATCTTTTACGT |
| | | | | AAAATGATTCAATTGAGGCTGTACTTTGGTCGATTCTGA |
| | | | | CTTAATTGGGAACATAGGTTACGTTAGCTATAAGCCTAT |
| | | | | AACTATAAGTAAGCATGTGTTTATATGTCACAATGACTT |
| | | | | GATTAAAAGTAACCTTATGATTTTCTTAGTATACGTTAG |
| | | | | TAATCTAACAGTATCATAATAACGGACAAAAATGTGCTG |
| | | | | GTGGATCAGCCCACCCAGCCCGTTAGAACATGACATAAA |
| | | | | AATGACCCAACTTGACCTATCACCTAAGCTCATTATAAT |
| | | | | ATGTTATCCAACCCACCCTATCTTGGCACCTGTGACCTG |
| | | | | TATTCAAATGTATACTGTAAGCAACTTCCTGTTTTTCTT |
| | | | | AAACATGTATTCTGTTTTTTCTTTCCAATGAAGGGTGAT |
| | | | | GTGAAGTTTGCGGAGGTACTTGGACAAATGGGTGCGGAA |
| | | | | GTAACATGGACTGAGAACTCAGTCACAGTTAAGGGCCCA |
| | | | | CCAAGGGATTCTTCTGGAAGGAAACATTTACGTGCTGTT |
| | | | | GATGTGAACATGAACAAGATGCCTGATGTTGCCATGACT |
| | | | | CTTGCTGTGGTCGCTCTTTATGCTGATGGCCCTACAGCC |
| | | | | ATTAGAGATGGTATCCTTCCTTTTAATGTGGAAAAAAGT |
| | | | | TCAACATGTTTTCACTAAGTTTTCAAAGTAAATAGATAG |
| | | | | ATATGACTTCAAAATAACTCTATTGCCATGTTAAATCTT |
| | | | | ACACATATTGCAAGCACATTCTAGTGGTGGTTTGGAATG |
| | | | | GCATTATGAAATTGAATATCTAAAATATTTAATTTAAAC |
| | | | | ATGTTCGGTTTCTGATCATTTAGGGTCAGTTTTAACTGA |
| | | | | ATCTCAGAGAAGTCGCGCAAGACATGTCACATATTTGTT |
| | | | | TCTCCGAGTCTCAGACAACTGCTTTTTCAAAATGAAAGC |
| | | | | ATTCTAGAACTATTTTGCTTACAGTTGATTTTCTAATTC |
| | | | | TGGGTGTACATAAATCAAGATAATTACTTTTATAAAACA |
| | | | | CATTCAAAAAGCCTCCTAGATGCCCCTATTATGAATTTT |
| | | | | CTGTTTGCTATACGAGTATCTGCTTTGTTTTTGAAAATG |
| | | | | GTTTTTTTGTTTTTTGCCAGTTGCTAGCTGGAGAGTTAA |
| | | | | AGAAACCGAAAGGATGATTGCCATTTGCACAGAACTTAG |
| | | | | AAAGGTAAAATGATACTTTGTTACTCTGTGATCTATGAT |
| | | | | ACTGCTATTGCTTAGAGGTCACTAAAGTGGTAAGGTCAA |
| | | | | ATAGGATGGGTTTGAATGGGAACACTTTTCGCCCAAAAC |
| | | | | ATATTTAACTAATATAATTTCACTTGTTACTATCTAATT |
| | | | | TCATAAATGAAATGATTTAGAATTAGAATGTTTTGGGTG |
| | | | | TCTTGCAACCTATTCATTTTAAGCTATTTTAATTGTCTT |
| | | | | TTGACCCATTAGAAATATACATAAGAAATATACTTAATC |
| | | | | AGTCCTCTATTGTTAATGTTTATCTGGGGTGAAATTTCT |
| | | | | TCAGTTGGGAGCAACAGTTGAAGAAGGTCCGGACTATTG |
| | | | | TGTGATCACTCCGCCAGAGAAGTTAAACGTGACAGCAAT |
| | | | | AGACACATATGATGATCACAGGATGGCCATGGCTTTCTC |
| | | | | TCTTGCCGCTTGTGCAGATGTTCCTGTGACCATTAAGGA |
| | | | | TCCTTCTTGCACACGTAAGACGTTTCCTGATTACTTTGA |
| | | | | AGTTCTTCAAAGATTTGCCAAGCATTAATGTGATTATGG |
| | | | | GTAGTGGTTTGCTTTTCTATATGTAATTTTTGTTTCATT |
| | | | | TGTAACGAGTAAAATGTGAGTTTTGGGCATAACATATTC |
| | | | | TTATGAACTTGTATTCTTTCGTAAGATTTTTTTAGTGTA |
| | | | | ATAAAATATTTTGCTATTTCAGTTGATGATTTCTATTAC |
| | | | | GGTAATTATGCATCTGACTTCCACTTATACTACGATGTG |
| | | | | CATGGCTTTGCGTGAACAGATTGCCAAACAATTTAGTCA |
| | | | | TGTGGCTGGTTTGATTGCCCACACTTGTTGAGTTGTTGG |
| | | | | CTAGTCGAGTTTGGGTGATCAGAACCCATGTGGCTCGGT |
| | | | | TTACACTTTGCGCCCTAACATGTGTGTTTTAAAGGTTAA |
| | | | | TTAAACTTATTAAACGGCTTAGTAATTTAAGTCAATAAA |
| | | | | ATCATTCAAGTTTCTTTTGTTCCTTTGGAATGATTTAAG |
| | | | | CTAATATGAAAAGGGTACTTTTCTTAGACAAAAGTCAAA |
| | | | | ATGTGAATATTTACTTTCAAATGAACTCTGGTTATTTAC |
| | | | | ACGAGAAATGGGGCATTTTTATTTTGATTTTTTTAAAAA |
| | | | | AAGATCTTTCTTATTTGTTATTTATTGTTTAGATAGTAT |
| | | | | AACACTTCAAATTAAACTAAATAAAAATAAATACGACGA |
| | | | | GTAGTAAACAAGAAGAACCAATAGGAACTTCGGCATTTT |
| | | | | ATGAAGCCCAAGGTGCATGAACCTTTAAGAGCATATTCT |
| | | | | TTTATCATATTTGTAGGAAATTGTATACATACATACATA |
| | | | | CATTATAATATTATATTGTATATAGAGAAGACAAGTTAT |
| | | | | ATGTACCATTTAAGGGAAGGCATGGGACAAGGTGCCAAG |
| | | | | ATTCATAAACAAAGAGAACATGGATGCCTCGACTTGTGA |
| | | | | CTCAAATTGCTCACATGCTTTGCATCAATTTGATGACTT |
| | | | | ATATATAATCTTAACGTATTATAATAACCTTAAAAGTGA |
| | | | | AATTTAACCCATGCTTATTTTTATACCTTTACAATCTTG |
| | | | | ATTATAAGTTAAGATCGAAGCACTTTATGTTTTTTGAAA |
| | | | | ATAGTTTTTCCATCCAAAGATCATCTATGTGAGTAGGGA |
| | | | | CGAAACCAGAACTTTCACTGTGAGAGGACAAATTTAGAA |
| | | | | ATCGTATGTTATACTTAAGATCTTAAGCTTTTTGATGTC |
| | | | | TTAAACTAGTCACTTGCAAATGCATCTACTAAATTATGT |
| | | | | AAAAGTAGAACCTCACTTCAACTTTGTATTTTTAAAAAA |
| | | | | AAATTGGTATTTAAAAAATAAGGCTAGTAAATGTTAATA |
| | | | | TTAACTAAAAAAATCCTTTAAAAATAAATGTTTAGCTTC |
| | | | | ATTTAACAAATTTGAGATTATGTTTATTCTAAAAATATC |
| | | | | AGAAAGGTTAAATGCTTTGAAATTTTCTATTACTTTAAT |
| | | | | ATTTGTCCATAAATTAAAAAACCTATATATAAAATATAA |
| | | | | GGGTTAAAAGGGTTTTCTTTAAAGTAAAAGGGTCAACAT |
| | | | | AACAATCTCAATAAAGTTTTGAGATTTAAAAGGAAAAAA |
| | | | | TCTAAAAGGCAAGGTAACTTTTGCAAATATGTTGTCTTC |
| | | | | CTCCCTTGGTCTCTACAACAGCAAAGTTACAGCACCATT |
| | | | | AAAACACAAAATGCTTTATCTATTGATTTATCCATTGTT |
| | | | | ACTACAATAATAAGCTCTTAATCGTATAAAGCATGGTTC |
| | | | | CGTTATCACCTATTTAGGCTTTTCATTCTTTTTTAAAAA |
| | | | | TAAAATCCAAGTATACTTTAAAATTAAAAAAAAATAATT |
| | | | | AGAATTTAGCAAAATTGGACTGGGGGCAGTTGCCCCCAT |
| | | | | TGCCCGCATACTAAATCCGTCCCTGTATGAGAGGTAAAA |
| | | | | CATATTTTTCTTGTTATTGCATATATATACTACAAAAAA |
| | | | | AAATTCATTTGTCCACATTTGGTTATCGAAATTGTGAAA |
| | | | | AAATTTATGAATTTAATCACATTTAAAAGTGTGTAAAAA |
| | | | | TAATTTACATAAAATCACAATACTTATACACTTATAAAT |
| | | | | GTGTAAACAAAATATTAACACTTAAAAGTGTGAACAATT |
| | | | | GTTAAATATTTTCATACTTAAAAGTGTGAAAGTCAATTT |
| | | | | GTGACACATGATTTCTTCACACCCTACGTGTATAAAGAA |
| | | | | AATAAGTGTTACAAATTAACTTTCACACTTTAAGTGTGA |
| | | | | ATACCTCTATATTTTTACACACTTAAAACTATGAACTTT |
| | | | | TCTTTTTCACATGTATAAGTGTGTAAATATTGTGATTTT |
| | | | | TTAAATTTCTTCACACTTTGAAATGTAAATTATACACAT |
| | | | | TTTTAAATGTGATTAAATTAACAAAAATTTTTACACCTT |
| | | | | TTAAAAGTATAAAAAAACAAGTGTGAGGAAATGATATAT |
| | | | | TTGTTGTAGTGATAAAACAATGTAAATATCAATGATATT |
| | | | | ATATCATATCACGAACATGACATGAAAAAGATAAATTAT |
| | | | | CATATTCTTAATCGGAATTATAAAAAAAAAAAAAACAAA |
| | | | | AAACAAAAACTATTTCTCCCTTACGCAATTTTATTATAA |
| | | | | AATTCTTGCAAATACATTAAACTATAAAAATATTGATGA |
| | | | | AGAGTCAAGTGACCAGTCCCTTACAATTTAATTAATAAT |
| | | | | ATTAAAATCACTAAATCCCTAGTTTTTAAATGATGCCTT |
| | | | | TTCATTTGTAGTCACGTTGTTTGTAAAGGTAATACTTTA |
| | | | | TTAAACCTTAAGTTAGCAAAAAATAATTAAAACCATTCT |
| | | | | TGTTATCATGTCATTTTCTTAATTATTCAAAATATAAGC |
| | | | | AGTGATATAGAATTGTTAGATTAATTTTGCTATTTTAAT |
| | | | | AATAGGAAGAAATGTGTGGTATAAAATTGTTTTTTTCTT |
| | | | | TTTGTCTTTTTAAAAGTGTTCTAAATTAATTTTTTCATA |
| | | | | TATGTATATATATACAATATTATTTACAACAAATATACT |
| | | | | TATTTTATTACATAATATATATAATTATATATAACATAT |
| | | | | ACTTTTGTAAATGATTATAAATTATTGTAAATTTATTAC |
| | | | | TCCTTAGAATAGAATTATTAAGTGAAAAAATGCGACATA |
| | | | | TCATGTGAGAGTTGGATGCCACATTTAGTGTCAAGTTCA |
| | | | | CATGATCCTCGAGTTTTGTCCAACCTTCTTTACAGATAA |
| | | | | TTCCACAGCTACGCCTTTTAGATACGCATACAAGAGTTT |
| | | | | TGTCCAACCTTTTGTGAACAATTTTTCCCCCCCTTTTAA |
| | | | | ACGGTAAATACATTTTTATAACATAATGTTAATGGAACT |
| | | | | TAAACTCGTAAATTTTTGGTATGTACCACATCAAATATT |
| | | | | ATTAGATTATAAATGTCATTTAGTTTGCGATAATATATT |
| | | | | TTTGGTAACGATCATTCAAAATAATTGATAGAAACAAAA |
| | | | | ATAAAATAAAATAAAATATTGTGTTTGCTATTCGTGAAA |
| | | | | AGAAATCCGTGGTTCATTATAAGGTAAACAATTATATGT |
| | | | | GACTTGACATATGCTATACTTCTTAAATGACTTGGATGT |
| | | | | ATTTTGTTATTAGATGAGTTATACTTATACACTTATATG |
| | | | | CCTTGATAATGCCTTGATATTCATAACACGCAACAAGTT |
| | | | | ACTGCTTATAATTTGTGAACTACAAATTTGACTCTCCAA |
| | | | | CTCTCCATAGTGATTTAAGAAATTGATTGATGATGAATA |
| | | | | TACTTTAAAATTTTACCTATTCATATAGTTATAAGAAAA |
| | | | | AAAGAGTAAGTGTTATTTATTTTGAACACAATTTTTTTT |
| | | | | TTAATACATAAAATAGTCAAATCGATTATTTTCAAGTGT |
| | | | | GATATATGTGCATGTTATCTGATTGACGTATCAATGCTA |
| | | | | GCTAATTAAACATTAAATTAAATATATAAACTTATAAAG |
| | | | | GACTTAGGATTGTACTTGCATAATATATATAGTTTTAAA |
| | | | | ATGATTCTTCTGATAGTTTTATCATGTCCAATTGATTTT |
| | | | | GTTAGTTGTTAAATAATAACAATAATGATAATAATAAAA |
| | | | | TAAATAAAATAAATAAATAATAATAATAATAATAATAAT |
| | | | | AATAATGTTTAAGGTTGCAATAACGTGTATAAAAAATTA |
| | | | | TATTTATATATCAAAAGTTCTCTCTTGAATTTTATGATA |
| | | | | AATGTACATTTTATAACAAAATCTTTATCTTTATGAAAA |
| | | | | ATAAAAAACTAAATTTTGATATGATTAAAAAAAAAAAAA |
| | | | | ATGTTTTAGTATGTTAGGCTCAACTCTCACGTGACATCA |
| | | | | AAGTCATCAATAACTTAAGTTTATTTTACTGTACGAAGT |
| | | | | CCCTGCAGATTGTTAAAGGTGATCTTAAATTAAAAGCGT |
| | | | | AAAAGATCAAGTCTTCCATATAATAACCAATCACACCCT |
| | | | | AATTTTTTTACCCCAAAATCCTAATAAAATTCATGAAGA |
| | | | | TCTTGAATATTCTTTCCCTTTTACACCTCCCCCGTTTGA |
| | | | | CTTTCTTTAAATGTATACTTGAGCTTGATTAATAGTCCA |
| | | | | CCCTAATAAAATCTCACCATTTTCACACCACAATTTTAT |
| | | | | TTCAAATCTTCTTTCAAACTTTCACTCTCTGTTCTTCAC |
| | | | | CATTCTCTCTCCAATCAACTTTTTTCTGCAAACCACAAT |
| | | | | CACTCCCCTGTTCAAGAAACCTCAAGATTCCGCCATTAT |
| | | | | CAAAAAGTTTTGTTCTTTCTTATCTTGTTTTTACATTCC |
| | | | | TTACGCCAAGATTCAAAACCCACAAACCTTTCATAAAAC |
| | | | | CCAAGTCACGTATCAAGAATTTAGCACATAAAGTTGGCT |
| | | | | TCTTTTTTCATCTTCAAGATTACATCTTTTTATTCAAGA |
| | | | | TTTTTGAACAAGAATGAAGCTAATGGATGAAGATGAAAC |
| | | | | CCCATCAACTCCTGGTAAATTCAAAATAGATAATAATAA |
| | | | | ATCCATATACATTCATCATAGATTCAGATTTCTACATTA |
| | | | | CAAATCTTTAGCCAAACTTACATTCTGGTCCTTTGTTTT |
| | | | | CTTGGGCTTAATCTTGGTTTTTTTCTTCAATTCCCAATC |
| | | | | ATCATCATCACAAATTGTAGATCTTTCTAGAAGATCTTT |
| | | | | AAAAACAAGTACATGGGGTGGACCCATATGGGAAAAACG |
| | | | | GGTCAAATCATCAGCCCGGATCCGAACCCGTAATGGGAT |
| | | | | ATCCGTATTAGTCACAGGTGCAGCCGGGTTTGTAGGGAC |
| | | | | ACATGTCAGTATGGCCTTAAAACGGCGTGGTGATGGTGT |
| | | | | TTTAGGTCTTGATAATTTTAATGACTATTATGATCCGTC |
| | | | | GCTAAAAAGAGCTAGACAGTCTTTGTTAGATAAAAGTGG |
| | | | | GATTTATATAGTTGAAGGTGACTTAAACGATGTCGTTTT |
| | | | | GTTAAAAAAGTTGTTTGAATTAGTCCCATTTAGTCATGT |
| | | | | TATGCATTTGGCTGCACAAGCTGGTGTTAGATATGCTAT |
| | | | | GCAAAACCCTAGTTCTTATATTCATAGTAATATTGCTGG |
| | | | | TTTTGTTAATCTGTTAGAAATTTGTAAAAATGCTGACCC |
| | | | | TCAACCTGCTATTGTTTGGGCTTCATCTAGTTCGGTTTA |
| | | | | CGGGTTAAATACGAAAGTACCCTTTTCAGAAAAGGACCG |
| | | | | GACGGATCAGCCCGCGAGTCTTTATGCTGCCACGAAAAA |
| | | | | GGCAGGGGAAGAAATCGCGCATACTTATAATCATATATA |
| | | | | CGGGCTGTCATTGACAGGGTTGCGTTTTTTTACTGTTTA |
| | | | | CGGGCCGTGGGGTAGGCCGGATATGGCGTATTTCTTTTT |
| | | | | TACCCGAGACATTTTGAAAGGGAAACCGATACCTATATT |
| | | | | TGAAGGCCCAAATCATGGAACAGTGGCTAGAGATTTTAC |
| | | | | GTATATTGATGATATCGTAAAGGGGTGTTTAGGGGCGTT |
| | | | | AGATACTGCAGAAAAGAGTACTGGGAGCGGTGGGAAAAA |
| | | | | GCGCGGGCCAGCCCAGTTACGGGTTTTTAATTTGGGCAA |
| | | | | TACGTCGCCTGTGCCTGTTTCCGAGCTAGTTGGGATATT |
| | | | | GGAAAGGTTGTTGAAGGTTAAGGCGAAACGAATGGTGAT |
| | | | | GAAAATGCCACGAAATGGGGATGTGCAGTTTACGCATGC |
| | | | | GAATATTAGTTTTGCGAAGAGGGAGTTTGGGTATAAGCC |
| | | | | GACAACGGATCTTCAAAGCGGGTTGAAGAAATTTGTGAG |
| | | | | ATGGTATGTTAGTTACTATGGAACAGGAAAGAAGACTGA |
| | | | | TCACTGATATGATTAAAAAAGATGGAAATTTGTTACCTA |
| | | | | AAAAAGACTAAATTTTTTTGTGTTATAATTCTTGTTGAT |
| | | | | TTGGATTCTCATATTGATTGTTTTTCATGATATGATGAT |
| | | | | GGTAATTGTTTGATACAAACTATATTGAGACTACAAAAG |
| | | | | GAATATATTGTTTTAGTTCATTATTTTTGTGTGATGTGT |
| | | | | ACTAATAAGTAAGATTTCACATATGTTTTTGTAGGCTTA |
| | | | | TTGTTTTGTGGATTTCACGAAAGTTGAGTATAATTCGTT |
| | | | | AGATTTCTGATCTTTCTGAACTCGAATCTGGCAACATTA |
| | | | | ATCACACGATCAACCACGCCTGCTTGGATACAAGCACCA |
| | | | | TACAGAAAGTAGTATCACGTTGAAAATGTCCATTGTTAC |
| | | | | CACTGCTTTGGGGTTTTGCCTAATGTCCATGTTTTCATT |
| | | | | TTCGTTTTTTATCGATCTTGAACGAATCTAAAGCTAACT |
| | | | | TTAGAAAAGAACTGCAGACGCTTAACAAACCAACGTTAG |
| | | | | TTGTTCAAATCGGATCAAAATGAACATTACTGGTTTCAA |
| | | | | CCCGATTCTTTGTAAACAGACATTGCAAAGAGAGTTGAT |
| | | | | CTGTCCAGGTAGCAATTGATATATTTATTATCACTTAAA |
| | | | | ATCAATTAAATGATGGTTTAATGTACATATTTTGCAAGT |
| | | | | CAATAAATTATGTGACATTGTCACGAGTACACTACCAAA |
| | | | | CAGTTGGATTTGATGTTGCTTGTGAGTTGTACATAATGC |
| | | | | ATTAAAGTATCTTCATTTGGAGATGTCGATTTCCGTTAT |
| | | | | GAAAAACGGTTGGTAAGCTTTTATGTGCAAGTATTTAAG |
| | | | | AGATGTTAACACAATCTTTTGAGTTGTCACTTAAGAGTG |
| | | | | CTAAAGGAGTTTGTATATGGTGGAACTTGTACTATCAAA |
| | | | | TATTAGTTTGTACATATTTTCCCTCAAATTAGTAATTAA |
| | | | | ACGTCAATACTTGAATTTGAATACGGGATTTCCTCATCT |
| | | | | CCTCTTTAGACAAAAGTTGTGCTTTTGATCTACGTTTGT |
| | | | | TGCTTGAAAGTCAAAACCATTTTTTGTTGGAGTTGCTAG |
| | | | | GGACTGTTATCATGGGTCGTCATACATAATCAAAAGATT |
| | | | | GTGATCTAATCGAGATATAAACTTTGTGGTGTTGAATGA |
| | | | | AATGAGCCATTGTTTGTAGAATCTTAGCTTTGTTACCAT |
| | | | | TGAGTAAGATCATCGGATAACAATTTTAGCAAATCTTGG |
| | | | | CCATCTCATTAATATACGAAATACCATTTTTTATGTAAA |
| | | | | ATAATTAGTTACTACGTATATGTACTTATCATACAATGA |
| | | | | ACTGACAGTAATTAAGTTATAAATTTGATGTAGGTTTAG |
| | | | | GTAAAACCTAAGAAAAGCTATATTGAATGTGCACTTTAT |
| | | | | TATGTCTAGTTCATGAACATTAAAGGAGAGTAACAACCC |
| | | | | TCGAGCATAAATGTGTGTAAAGAACATGGATGCCAAATT |
| | | | | TACTAATTTAATAATCAATACTGTAAAGGATTATTAGTA |
| | | | | TTATTATTACTATGGGGATGGGAATATAAGGTTG |
| 63 | Conyza | Genomic | 12222 | CAATTTAGGAGTTTACTGGTTCTCGAATACCAGCCTATC |
| | canadensis | | | TTTGTTATTGTTTGATACAAGCCATTGGTTCGTATCAGA |
| | | | | AGTTTAGTTGTTTTTTGTCTCAAAAGTTTTCCCCTCATT |
| | | | | TTTGAGGTGATTAGGAAGGAAAACTTCTCTTCCCTCTCA |
| | | | | TCTCCTTTCCTCCCTTAAGTTAACTAGACATTAATGAAT |
| | | | | ATTGGGTCATTTTGTTGTTGTGGCTATAAGGAATGACTT |
| | | | | GACTTAAAAACTTATAGAAATGCTGTGTTATCCAGTAAG |
| | | | | TAATCGTTTTTTTACTATTTGTCTTTTAAGACCATTCAT |
| | | | | TAAGCACATAAAACAAACAACAATCCTGCTTAATCGATG |
| | | | | TAGACTACATACATGTAGACGGACATTTTATCCATAAAA |
| | | | | CAGCTAATTAGTCATACATACCAGTTATATGTTTTACAT |
| | | | | CGTGCAGTGTAAAACTTCTGCCTTTACTGCTAAGATTTT |
| | | | | TTGTTTACATATATATTAGATATATTAAGGTTTGTATTT |
| | | | | TGATGCTAACATTTAACATTACTTTTTTTTTTTATCGGG |
| | | | | GAGTGGGTTAAAGTGGTTCTTCTACCTGGTTTTAGTTTT |
| | | | | TTAGATGTATATCCAATATTTATTGTGGGTAATTTAAAG |
| | | | | TTTTGAAATTTTTGTTTTTTTTTGTGAACAGTATAAAGT |
| | | | | TTCTGACTTTTTTGATTTTTTGTGAGGTAAAGTCGTGAA |
| | | | | TGTGTAATTTGGTATTTGATTGATATTCTTGATATTGGT |
| | | | | ACATAGTGAGGTGCAAGGTGCTGATGGTTTCTTAGACGG |
| | | | | GTCATGTTTGTTTTGTGTAAAATACATCTGTTTTTTTCT |
| | | | | TTGATAACAAGTTATAGAAGTTGCACCCAAAAATGTTCT |
| | | | | TGTTAAAGCGATAAAAATTTGGATAGAAGGTGACGGTTA |
| | | | | ATGATTCGATATATTGATTTGAGTTTCCTTTTATCTATT |
| | | | | GCATTTTCACAAGTTCAACATTCCACCCTCGATTTTTTG |
| | | | | ATGAATCTATGACTGAAGAAAAGGGCGATTGTTGCCTTT |
| | | | | GGCAATCAGTTTTGGATTTTATTTTGTCATGGAAAGGGG |
| | | | | GTGTTAGTTCCTGAACCTTAGTAGAAGATGATAAGCTAT |
| | | | | AGTTTCAATATTGCTTTTCTTTCTTGCATCTGAACTGGT |
| | | | | TTTGCATTTTTCAAAGGACTATAAAAGATGCTATTTATC |
| | | | | ACCTATGACCTATGTTATAAATAGTAAGGTATTAAACTA |
| | | | | TTAATATTGGTATAGTCTTGAGAAATCCATGAATTTCGA |
| | | | | TTGAGTTCATAGGACACATCTAACTTATGTTTCTTTACA |
| | | | | TTACGATTTACACATCTTGTCTTTGACGTCTGATTTTAA |
| | | | | AATAGCGTTTCTATTGACATTATGCATTTCTTTGAGTTC |
| | | | | TCTATATAAATTTTTGTAAGCTTTCCATATGTATATACT |
| | | | | ATGAATCTGAGTGAACTTATGCTATCAGGGGACTACTGT |
| | | | | TGTAGACAACTTGTTAAACAGTGATGATGTTCATTACAT |
| | | | | GCTTGGAGCTTTAAGAGCTCTAGGGTTAAATGTTGAAGA |
| | | | | AAATAGTGCAATTAAAAGAGCAATCGTAGAAGGTTGTGG |
| | | | | TGGTGTATTTCCCGTGGGTAAAGAAGCCAAGGATGAAAT |
| | | | | CCAGCTTTTTCTTGGAAATGCAGGAACAGCTATGCGTCC |
| | | | | ATTGACTGCTGCCGTTACTGCTGCCGGTGGAAACTCAAG |
| | | | | GTATTTTAACTTAGTGTTATATTCTCCTGCATTTTATGT |
| | | | | CTGCTTCATCCTCCTACACATACATTTCATGACATGTGT |
| | | | | ACCCATTTCTCTCACCTCATCATTTCATTTTTCTATGTG |
| | | | | TCACAATTATATGAGTAGGAGGATTCATACTTTCATAGG |
| | | | | CATAAATTGTAGGAATCAAATATCGTTTCTTTTTAACCT |
| | | | | AACATCTCTTGATTAGCTATTATAATCCGTAGAACGTAT |
| | | | | ATTAAAGTTTTTTGTGCCGATATGTAATTTTAAGGTGAA |
| | | | | TACACAAATAAAAATTTTACCTTTCTGTTTGTTGCATGT |
| | | | | TCTGTACATATAAATTTTTAGTTTTTGTTATATATCTAA |
| | | | | GAATCTAAGATCTCTAAATATTCTTCTATTAGTTGACAC |
| | | | | AAATTAAGGGATCACATGAACTGAAAACTCAATAGCATC |
| | | | | CACTTGTTGATAATGCTGCAATTTAATGTTCCAAAAAAG |
| | | | | AAATTATTGCAATTCTTATTATCATTTTATTTATGGGAG |
| | | | | ACAGTGAGTATGAATTTGGGAATCGATAATAGAGTTGAC |
| | | | | CAACTTGGTGGTGCTGGGTAGCTAAGGTAGTGGGTAAGT |
| | | | | TACATTGATATGTAATACCCTAACAGTTATGAGTTTTTT |
| | | | | CTTCAGCTACATACTAGATGGTGTTCCTCGAATGAGGGA |
| | | | | GAGGCCAATTGGTGATCTGGTCACCGGTCTAAAACAGCT |
| | | | | TGGTGCAAATGTTGATTGTTCTCTCGGTACAAACTGCCC |
| | | | | ACCGGTTCGTGTAGTTGGAAGTGGAGGCCTTCCTGGTGG |
| | | | | AAAGGTAATCAACAATAAGATTGCTGCACTTTTAAAGTC |
| | | | | GTAAGAATTAATTATTCGGTTCCATATTGGTTTTGGCAA |
| | | | | ATTTGGTTATTTAAGAAACTATTAGATAGTAATGAACTT |
| | | | | ATAGTTTTTGAATCTTTCCGTAACCTTTTTTCCATGCCC |
| | | | | TTCTTATTGCAGGTGAAATTGTCAGGATCTATAAGTAGT |
| | | | | GTATACTTGACTTCTTTGCTCATGGCAGCTCCCCTTGCA |
| | | | | CTGGGAGACGTAGAGATAGAAATTATAGATAAATTGATC |
| | | | | TCTGTGCCATATGTACGGATGACACTGAAGTTGATGCAA |
| | | | | CGGTTTGGGGTTTCAGTAGAACACAGTGATACTTTGGAC |
| | | | | AGATTCCATGTCCGAGGCGGTCAAAAGTACAAGTAAGTT |
| | | | | GATCATTCCATAAAAGTCAATCTTTACGTGAAGATGGGT |
| | | | | CAACAGCTATTTTAGTCTGATAAAATCTCTTTAGGTCGC |
| | | | | CTGGAAATGCTTATGTGGAAAGTGATGCTTCAAGTGCGA |
| | | | | GTTACTTCTTAGCTGGTGCTGCCATCACTGGCGGAACTG |
| | | | | TCACCGTGGAAGGTTGCGGGACAAGCAGTTTACAGGTAT |
| | | | | TATCCATGTGCCCACCTCAAAGATATTCAAAAACTAAAT |
| | | | | TGTTTCTCAAGTATATATTCTTCTAGTTAATTGCAAATT |
| | | | | TTTTTGCCCCATACGTCTACCCATTCTATAAATTTCGTC |
| | | | | CAAAGTTGGTGACTCGGTTCAATCGTGTAATAAGTCTCT |
| | | | | TTTTTGTTTTTTAGAATTGACAATTTATGTCAGTTCTTG |
| | | | | GTTATATCAACGATGTGGGAGTGTATTGTGCACACATTC |
| | | | | TAAAAGAAGGACATTTAGTCTTTTTGCTTTCTTTTTGCC |
| | | | | TCAAGATCATCTTCATCTTTTCAAGATACTCTGCACTCA |
| | | | | TTTGCATTATCAAAGTTTTGGATGCATTCTGTAACTGTG |
| | | | | GTACAAGGAGGGAGACATAATATGTCATTAGTTCTTATT |
| | | | | CTTAAGCTCAATGCACACTATCACCTCTTACTTCTTTTT |
| | | | | TCTTTCTTTTTTTTTATTAGTTTATTTAAGCTCAATGCA |
| | | | | CACTAACACTTCTTCTTTATAACTTCAAGTCATTCATTT |
| | | | | TAATTTTTGAAGCTGATGGTTTTTGACATTAAAGATAGA |
| | | | | ACTATGTATATACATATGTCATTTCATCTTACCTATTTG |
| | | | | CATGTCTTGTTGATCTTTAATCAGGGTGATGTAAAATTT |
| | | | | GCTGAGGTCCTTGGACAAATGGGTGCTGAAGTAACCTGG |
| | | | | ACAGAGAACTCTGTCACGGTGAAGGGTCCGCCAAGGAAT |
| | | | | TCTTCCGGAAGGGGACACTTGCGTCCAGTAGATGTGAAC |
| | | | | ATGAACAAAATGCCGGATGTTGCGATGACTCTTGCTGTG |
| | | | | GTTGCCCTTTATGCTGATGGCCCCACTGCCATTAGAGAC |
| | | | | GGTATGTGTTAGAATTCACCACAGCTTTGTAATGTTAAA |
| | | | | TATATGTTAGTTTAGATTAACAAAATGACTATATGATCA |
| | | | | CAAAAGGAAACATTTATCTCAAATTTGGAACTAATATAG |
| | | | | TATCATACCTATATAGCAATTGTAGTTTCAAAGAAATCC |
| | | | | TTAAGGTCGTGTTGTTTATTATACATGACTGGGTATATA |
| | | | | TTGTTTTTTGTGCTCAAGCTTTTAAAAATCACATTTGAC |
| | | | | TATCCTTTATTGAAAGGTTAATTTTGTTCATGTCTCATT |
| | | | | TTAGGCAATTTACTTTTTATCAAGGAAAAAATAGCAATC |
| | | | | AATGTCTATGTCGTAGTTTAGGCAATTAAAACCCATCAA |
| | | | | TCAAAGTGCTGTTGGTTCAAGGCATATTAGAGATAAATG |
| | | | | AGATAATAGTACGTGGATGTCTTTTCAAAAGAAGTACAA |
| | | | | ACTTTTTCTTGGGCTCTTTAGTTTTTACTGAAAATACCA |
| | | | | AACTCCTTTAACTGAATTGTCTAAAATAGAAGAAACTGG |
| | | | | AAATTAGTTGCTATTTTGTGAAAACGAAAAGTAAATCGC |
| | | | | CAAAAATTGGAGGTTAAGTATGCTTATATTTTATGTAAT |
| | | | | TCATCTTTTTGAAAAATGTAAGAACTTAAATGGAAGTGA |
| | | | | ATTGATTTGAAAAATATATATTAAAGCACCACTTATGAA |
| | | | | GAAATCTAGAAATTGAGTTTTAGGATCTGTAAAGACATC |
| | | | | CTGTATATTGTATGAGAATAGATATATCGTACACCACAA |
| | | | | TCCATCATTTTTACTTTTCACACGACAAAGTGAATATGA |
| | | | | AAAATGTGAGTTAAAACACTTAAAAGACAGTTTTGGGTG |
| | | | | TGCAAAGTAAAATGTAGCACAAATTGGCCCCTTTCTCAT |
| | | | | ATTGGGTTTACATATTCTTCTTTACGTATATCCCTATAT |
| | | | | TGTTCATTTTGTGGGCCCCATCTCACGTCGGTAAATCAT |
| | | | | TAGATGGACTAAATCATATTCTTCATTCCTTATATTGGG |
| | | | | CAGTGGCTAGCTGGAGAGTAAAAGAAACGGAAAGGATGA |
| | | | | TTGCCATCTGCACAGAACTAAGAAAGGTACAAGTCATTA |
| | | | | ACCCATCTTACTCTAAAAAATAGAATGGCCATGAGTACT |
| | | | | TTTAAAGTACTCAATGAATCTGCCCATTATTTGTTTAGT |
| | | | | GCTAATAGGCCCTTTTGCCCTTGGAACTTTTCAGTTGGG |
| | | | | AGCAACAGTCGAAGAAGGTCCAGATTATTGTGTGATCAC |
| | | | | TCCACCAGAGAAATTGAATGTGACAGCAATCGACACATA |
| | | | | CGATGATCACAGAATGGCCATGGCTTTCTCGCTTGCCGC |
| | | | | CTGTGCAGAGGTTCCTGTCACCATTAAGGACCCGGGTTG |
| | | | | CACCCGTAAGACCTTCCCCGACTACTTTGAAGTTCTTGA |
| | | | | AAGATACACTAAGCATTAAATCACATATAAGATGTTCAG |
| | | | | AAAGAAAGGGGTTAGAGGTTTTAAAATGACACCTTTACC |
| | | | | CTTCAGTCCTTCACCATTATCTTTCTTCAGAAATGTTTC |
| | | | | ACTTACAGAGTTACATCATATGTATATGGGCGACCTGAG |
| | | | | CGTATTTTATCTTTTCTTTTCGGTGAGTTTGTAGTTTTT |
| | | | | GTTGAGGTGGAATAAGTATTATCTTGAATATTTATGCTA |
| | | | | AATTTGGTTAGCAATGTATTATTTTTGATGCATAATGTA |
| | | | | TTTGTTATATTATAATGAAAAGTGTTTTTGAATATGGCC |
| | | | | AAGATTTGTGAAGGTGAGATGAGTTTTGAACCTTATACT |
| | | | | CAGATTTAGCACATGGTGACACTAAATAATTGATCCTTT |
| | | | | ATTAGTGCTGAAAATAATTATATGTTAAGAAAGATTGGT |
| | | | | TACTAACAAAAGTGGTTATGAGTGAAAGTGGGGTTTAAG |
| | | | | TTTGAAGTCATAATTCTCTTGAGATGTTGATTTGAAGTT |
| | | | | GAGATGTACGATAGGGGTGTAAAGGCACCTTTGGGATAT |
| | | | | AAACAAAATCATGGATTATCTTATTCCTTATACTTCTAT |
| | | | | TGTATGTTAATTTTTAATTCAATTTTACTGAATTACTTA |
| | | | | AATGATATTTTGAATACTATAAAAGGTTGGTATTACTCC |
| | | | | ATATGTTATATGAGTCAGAAATACATTTCGTAATTTGCT |
| | | | | CTACATTATCTTAAGTAATATTTCTCTTCTAAATCCAAA |
| | | | | TTACTAGTTAATAATATATACTAGTAAAAATGTAGCTAT |
| | | | | AAGCCTATAACTAAAACCTGAAAAATGAAAAAGAAAATA |
| | | | | AACGCTATATAAATTATGGATTCATGCATGTATCTATTA |
| | | | | TATAAATAAAAGAAAATTGTGATGACATCATATTTATTA |
| | | | | GAAAAAAATCTACTTGGCATCATTAGACATTCACATATT |
| | | | | AATTATTTATTTTTTTTATTTAATTGATTTATGACATCA |
| | | | | ATATAAATAAATAGAATTTGATAATTCTATATTAGGAAA |
| | | | | TATCATTACTTTTAAAGATTTTGTGGCACTATTACTCTA |
| | | | | TTAGACATTTATATAATAATACTTTCTTTTTTTATTTAA |
| | | | | TTGATTTATTTATAAATAACTAAACTTTAATTTTTAATT |
| | | | | CCCATATTAGAAAATATCTTTAGTTTTAAAGATTTTTGT |
| | | | | GTGGTAACGGTTATAACTTAAATGTTCATAGAGTATTAT |
| | | | | AAATGAATATGAAAGGTCTTACACATTTTAATTCTTATA |
| | | | | TAGATTGTATATGTGTTTATAAAAAAAATCACATTTTGT |
| | | | | ACAATATCTTGAAGTTTTTCTTGAATTTTATTAAATTTT |
| | | | | GTGTTATATATCAATGGGTTGAATGTTAAATAAATTTTC |
| | | | | ATTATATAATTTTAGGTAAATTTTACATTATATAATTGT |
| | | | | CCTCAATAATTATTTCTTTAGTTTGCCCGCGTAATACGC |
| | | | | GGGTTACTTAGCTAGTCAAGTGATAAAGTTCCATTTAGG |
| | | | | TAAAAACTAAAAAACATGATAGAAGAGTTTACGTTAATT |
| | | | | GTATTATTTATCTAAAAATTCTATTTTTAGTTTCGTAAG |
| | | | | TTTAGACTGATCGATCATCTTGCAACTCGATGTTATACA |
| | | | | TGGCATTTTATCTTAAAAACTTTTACCCTTGTATTTTTT |
| | | | | TTTTTTTTTTTATTGTTTTTCTTTAAACATTCATATCTA |
| | | | | TAATCATGAAAAGAAATAAAATAAGAATTAGCGATAAGC |
| | | | | CAGATAAATACAAAAGGAGAAATTTAAGTACAAATGAAA |
| | | | | TTTTATTTCATCTTATGGTACAATGTAATAAAAAGTTAT |
| | | | | AGGAAAATTTAACTTCAGTCCTAAGATTGTTGTTAGCGT |
| | | | | GAATAAATAATTATACTTTTTATTTTAAAATTAGTTTGA |
| | | | | GCGCGTTAAGTCGTTATTGGCAACCCATAGAGTTGTTAT |
| | | | | TAGCAATACTAAATTTTTTAATTGTGGATAGCCAAAATT |
| | | | | AAATGGATGGGAATTTCCAATGACACACCGGTCTAGTGT |
| | | | | TAAGACACATGAGATTTTCTTATAAGTCGGAAGTTCGAG |
| | | | | TCTTGTCAAGTACAAGCTTTATTCATATTAATCCCCAAG |
| | | | | TAGTCTATGGTGATTTCTTTTGGCATTGTTGCTCGGCAC |
| | | | | GGGGTAGTAGGATCCGGTTTAGACAACCGACCAACCGCT |
| | | | | TTTTGGGTTAGGACCTCATCATTTGATGGTGAAGGATAT |
| | | | | GTTTCTATTCGAAAGTCATTTGTTAAAAAATAATAAAAA |
| | | | | TGAATAAATGAACGGAAATTATATGCACCATAACCTTAG |
| | | | | AATATACTACCAATATTCCAGGTTTATACTTGTGACTTG |
| | | | | CCAACATTTATTGTTGTTGATTGTAATAATGCTCATGTT |
| | | | | TCCTTCATTCTTCTTGTATAGTTCCTTGAAAAAATTTCT |
| | | | | TGTTGTTGATTGTAACTACAATGATTAATGTAGAAGAAA |
| | | | | CAATGGTTAAAAAAAAAATGATATTTGTACCATTTCTTT |
| | | | | TGATTGATGTATCATAAATGTGCATTGTTAACTTGTACA |
| | | | | GTTAGTTATACAATTTGTACATTATTATACATTAATAAA |
| | | | | AAATAGTGATACTAATATCACAAATTAAGCGTTAAAACA |
| | | | | GTGTGGGGTGGGGTCTAAAAGACTAACTCAGTAATTTAT |
| | | | | GATACTTGGAAATTACTCTTTTCCCAATTAAGCTTGCAA |
| | | | | TAAGTTGAAGTTTGGTGGTGTAGTAGCCAGCCTTTTTAC |
| | | | | TCTTTTCACATATATACAAACTCACATGATGTAGGTGCT |
| | | | | ACCCTAACCAACAAAGTTGGGGAATTTTGACAATAAAGG |
| | | | | CATTGAGTGTTTACCTAATTTACAGTCAAAATCTTGACA |
| | | | | CATATGACATATATACATTATGGCAAGAAAAAACAAATA |
| | | | | TATCCTAAGTTTAGACCAACACCATGTTGTTTTAAAATG |
| | | | | ATATTAAATATGTAAGTTATATACATTTCTACTTATTGG |
| | | | | TTTTAGTGGTTTATTTCTATATTTGCTATAAAAGTATAA |
| | | | | ATTATGGTTTTCCAATATGTTTTGTTTAGAGCTTTAGCC |
| | | | | GTTGAATTCATGGAAGAATGACATTTTGGGGTAAGTTAT |
| | | | | TGACATGAACGGGCTAACACCTTAGAAAAAATTATTGAA |
| | | | | GTATTTATAGATGTGTGTAATAACTCGAAGACATGTATC |
| | | | | AATGTCAATAAATAAGGTAACGAGAGGAAAAATAAACTT |
| | | | | ATGCATCAACGAATAAATGAATTAGGTATTAAGATATGA |
| | | | | TAAAATTGACATGATGTTTACTCTCTTTTCTTTTTTTCC |
| | | | | AAAAAAAAAAAATTATCGTTCATCTTGAATTAATTAGTT |
| | | | | AGTTTTTTTTTTTTTTTAATTAGTTACTATCACAAAGAG |
| | | | | TGTTGAAAAAGCCCTCATTCAAATGATTATTCCAATTCA |
| | | | | GGAAAATCTTAACACAAAGTACACAACTAAAAAGAGGAC |
| | | | | ATTAATCAAAACATCATACTCAAAACATTTGATAGTGAA |
| | | | | CAATAGATCAATTGGCTGGAGTTTTTTTTTTTTTTTTTT |
| | | | | TATTCCTGATCATAAGTTTGACTCTTCAAAATGACATAC |
| | | | | TTTTAGGTTTTCTTTTGACTAACTTATAACAGCTTATGA |
| | | | | TTTACATCTTGTAATTTAAAGTATGTGTAGGGATTCACC |
| | | | | ATTGTATGATGAGATATCCCCTGATATCAAATAACAACT |
| | | | | GACTCTTGAAGAAAAACATACTAATCGAAACCAAAAAAA |
| | | | | AAAAAAGAACGCAAAGTTGTAGATGGAGTTGTTCATAAG |
| | | | | CTTAAATTCCTCTTGATCCAGTGGGTATCTTTGGTGCAC |
| | | | | CACGTGAATGCTGATTTCCTCTTGAAGTTATTAAGCTTG |
| | | | | TAATGACAACAACTATGGTTTAAAATGATTCTAGAAGTT |
| | | | | AAATACTACGAGGTAGACATTTTTTCATCATTTGTTAGA |
| | | | | TAGGCGCATTTTGAAGATCGTTCAAGTCGTCTTCAAAAA |
| | | | | CGTCCTTTTTACCTAATGATCAATCAAGGCACGCACCTA |
| | | | | GCTATGAGATGAATACGTTGTTGATATTCCGCTTTTCGT |
| | | | | TATCACCATTCATCTCGACACGACGTATATATCTATATA |
| | | | | TATCCCAACTCTAGATTATATTCATAAGTTCGTATATTG |
| | | | | ATGAACTATATATGTGTTATGCACATGCAATGCACCCAT |
| | | | | AACATGGAAGAAGAATTATTGCTTTATTCATTCATGTGG |
| | | | | AAAATTAGGTATAATGGAATACAATGAAGGAACATGACA |
| | | | | AAGGTGTTACCCAATCACTAAAATTGTGTTTGGCACTAA |
| | | | | TGGAGCATTGCAATTGTACTTTCTAAATAATCCATATCT |
| | | | | TTAATGGATGGAAAGTTTCATACTTACTTATTACAATCA |
| | | | | GTAGATAACCATAAAAATGACATTAATATTGACCTTTAA |
| | | | | TTAATAGAATTTTAGAGTTTTTAACAAATCTTTTGTCAT |
| | | | | GGACTTCGTATGTAAATTGGGGAAATGCAATTTGTCTTC |
| | | | | TATGCAAAATACGAAACCAATTAGATCCAAAAGGTATGA |
| | | | | TGATAGTAACATCAATCAATACTCATTTATAAAAGAAGG |
| | | | | TTTCCTTTCATTTTCAATTTTTGTGTGCTCTTAATATAA |
| | | | | ACCTCACACTAAAAATGACTTATCCCATACTCACATGAC |
| | | | | ATGTCTCTTAACTTCCCTTTCAATTAGCTTTTTTTTTCT |
| | | | | TCCACTCCTTTATTGCACATCTAAAATTAATTTTTAAAA |
| | | | | ATATGACTAATGACTTTTAATCAATTATGGGACTAGTTA |
| | | | | ACTTATTAAAAAAGTATCCCCTTATTGAAAGTTACATAG |
| | | | | AGAAATGTTTAAATTACTCTCCAAATTTAATTATATAAT |
| | | | | ATTTTCATCTAGCACCCCTTAAAATATATTCACATAAAC |
| | | | | TATCCCCTTAACATTAATGATTAAGTTACACTATCAATC |
| | | | | GTTAATCTTTTAGAATATCTTCATTAACCCTAGCTATAA |
| | | | | ATAAATTACTTTTATATCAATTATTTACACCACTTAGCG |
| | | | | TCACTTCCACCACCAACAGTTGTCCCATCATCACACCGT |
| | | | | CACCGCCACAACCACTGCTGCATTGCGTGGATATAATGC |
| | | | | TACTATAAATAATAAATAGTAAGCTTGTAAGGAAAAAGA |
| | | | | GTGCCTCAAATACTTTTCTTATAACCCATTTGCAAAAAT |
| | | | | AATGGATATCTTAGAATGGCTAAGGAATAACTTATAGCA |
| | | | | TATTTTTTAAAAAAAAATAACACTTTATATTTGGAAGTG |
| | | | | TTGAAAAATATGTAATATTTTTATTTAACACGCCTTAAA |
| | | | | ATATTTTTACATACACTATTCTCTTAATATTAATAATTA |
| | | | | AATTACACTATCAATCCTTTATTTTTCTAAAATATCTCC |
| | | | | ATTAACCTTTTAAATCAATTATCTACACCACTCGACGTC |
| | | | | GCCTTCACTACCAACTATCGCCACCACCACACTGTCATC |
| | | | | GTCACGATTACCGCCGCATTACGCAGGTACCATGCTAGT |
| | | | | TGAATTTAACTATAATAACTATGAAGTGAAGTTGAATTA |
| | | | | ATCAAAGTTATGAAAGACGAAAAAACTTCACTCACTAAA |
| | | | | AACAATAGAAACCTTATTCTTTTTACAAGTGAATTTTAC |
| | | | | CTCAAACGTGTATGATGTATGCAAATCGCACAACGAATG |
| | | | | GGTCCCGCACTAAGCGGATCTTAAATAGTTTTTCTCACC |
| | | | | ATAACACCTCCTTAATTAGAAAATATCGTCGAGGAGAAC |
| | | | | CTACCAAAACTCGAACTCAAGATCTTGGAATAAATTCTC |
| | | | | CGGAGGCCCCGCATAGCAGGTTTAGTGAAACACCACTGG |
| | | | | CCATAAACGAAATGTAAATAATTTATTTCAAATCGTATA |
| | | | | AATTAGAAAAAGCAACACGTTTGGCAAAGTTTCATTTCC |
| | | | | CTGGTATTATTTATAAGTTTTCATTAATATTCCAACAAC |
| | | | | TAAAAATGGTAATGATGAGGAGTTATCAACGAATGTCAA |
| | | | | AACTAAATTCATTTGTATACTCACAATCAAATATTAATC |
| | | | | AAAACAAATCTTTAATATTATATATCATCACTAGAAACT |
| | | | | AGAAAGTAAACATATAAAATTGAGTGGTAGATTATGAAA |
| | | | | TATTATATAATAACGACCAGTTAAAAAGGTTATAACTAA |
| | | | | AGGGTTGTGATCAAATGAATCTAATAAAAATAGTGGATA |
| | | | | TCAAGGACTTAATCACAGCCATAGGATCAGATGAAATAA |
| | | | | ATGGTCCAGATTAGATTTTAAAAAAACACACGGAGGGGT |
| | | | | AAAATGGTAAATTTACCTCCTATGCTCACCTAACATTAT |
| | | | | ATAACAGATCCAGAATCCCAATCAAAACCCTAAAAATAA |
| | | | | AAACAAATCGTGAAATCAAATGGAGATTTCTCCGGCGAT |
| | | | | CAAATCGTGAAATCAAACAATCGTGATATCAAATCGTGA |
| | | | | TATCAAATCGTGAAATTCCGACTAATAACAATAAAAAAC |
| | | | | TCCGGCGATCTGGAATCTGTGAGCGGTGGTACAGCTAAT |
| | | | | TGACATAATCTTTGTTGATAATCTTCAATAATTCAGTGA |
| | | | | TGGAATCAATAGAAGAATTAGTTATGGAATCAAAAGAAC |
| | | | | ATGATGTTTCCGACGACGAGATTATTGAAGATGAAGAAG |
| | | | | GGATATTTGCAGACGAGGAAGAAGACAACACAGGTACAT |
| | | | | AACCAATCAAAGTTGATTTTACATATAATCGTTGATTTC |
| | | | | ACATAGGAATATAGTTTTTCAGCTTGAAGTAACATGCCT |
| | | | | AATAAAATCAAAGTTGATTGTACATAGGAATATAGCTTT |
| | | | | TCTGCTTACAATCAAAGTTGATTGTACATAGGAATATAG |
| | | | | CTTTTATGCTTACAATCAAGGTTGATTCTACATATGCAT |
| | | | | GTAAATTTTGTGTTTGAACTAATCTGGCTAATCCAATCA |
| | | | | AGTTGATTGTACATAGGAATATAGCTTTTGTACTTACAA |
| | | | | TCAAAGCTGATTGTACATAGGAATATAGCTTTTGTGCTT |
| | | | | ACAATCAAGGTTGATTGTACATATGCATCTAAATTTTGT |
| | | | | GTTTGAACTAACCTGCCTAATCCAATCAAGTTGATTGTA |
| | | | | CATAGGAATGTAGCTTTTGTGCTTACAATCAGAGTTGAT |
| | | | | TGTACATAGGAATGTTAATTTTCTCCTTGAAGTAACCTG |
| | | | | CCTAATCAGATCAAA |
| 64 | Conyza | cDNA | 1882 | ATGGAGGTTTGGTAGGAAGTGGTGGTGGTGGTGGTTGGT |
| | canadensis | | | ATGAAATTTTGTTTTTGACCTTCTTCAAACATCCACCTA |
| | | | | CTACTGACCCCTCCCTTCAAACCCAACCCAAAATCCAAA |
| | | | | TCATTAAATCCTTCAAACCCACTGTGTGTTTTGTGTGAA |
| | | | | ATTTCACACACAACAAACAATGGCAGCTACTCACATTAA |
| | | | | CACCACCAACATTGCCCACAATCTCCAAGCTACCACCAG |
| | | | | TCTTTCCAAAACCCAAACCCCATCAATAAAGTCACAACC |
| | | | | TTTTTTATCTTTTGGGCCAAAACACAAAAACCCGATTGC |
| | | | | CCATTTCTCTGTTTCTTCTAATAATAATAGAAATCTTGG |
| | | | | AAAAAATGTTTAATAGTTTCTGCCGTTGCCACCACCGAG |
| | | | | AAACCGTCAACGGTGCCGGAAATTGTGTTACAACCCATT |
| | | | | AAAGAAATCTCGGGTACGGTTAATTTACCCGGGTCCAAG |
| | | | | TCGTTGTCTAATCGGATCCTCCTCCTTGCTGCGCTTGCT |
| | | | | GAGGGAACGACCATTGTTGACAACTTACTCAACAGTGAT |
| | | | | GATGTTCATTACATGCTTGGAGCTTTAAGAACTCTAGGG |
| | | | | CTAAACGTTGAGGAGGATGTTGCAATTAAAAGGGCAATT |
| | | | | GTGGAAGGTTGTGGCGGTGTGTTTCCTGTGGGTAAAGAA |
| | | | | GCTAAAGATGACATACAGCTTTTTCTTGGGAATGCAGGA |
| | | | | ACTGCTATGCGTCCATTGACTGCCGCAGTTACTGCTGCT |
| | | | | GGTGGTAATTCAAGCTACATACTAGATGGCGTTCCTCGT |
| | | | | ATGAGAGAGAGACCAATAGGTGATTTGGTCACGGGTCTT |
| | | | | AAGCAGCTTGGGGCAGATGTTGACTGTTCTCTCGGGACG |
| | | | | AACTGCCCTCCCGTGCGTGTAGTTGGTGGAGGTGGTCTC |
| | | | | CCTGGAGGAAAGGTTAAGTTGTCGGGATCTATTAGTAGT |
| | | | | CAATACCTTACTGCTCTGCTTATGGCTTCTCCCCTTGCC |
| | | | | CTTGGGGACGTGGAAATTGAAATCATAGATAAACTAATT |
| | | | | TCCATACCATATGTCGAGATGACACTGAAATTAATGGAA |
| | | | | CGGTTCGGCGTCTCGGTAGAACATAGTGATAGTTGGGAC |
| | | | | CAGTTCTTTATTCGAGGCGGCCAAAAGTACAAGTCACCT |
| | | | | GGAAATGCTTATGTAGAAGGTGATGCGTCAAGTGCGAGT |
| | | | | TACTTCTTGGCTGGTGCTGCCATAACCGGAGGCACCATC |
| | | | | ACCGTTGAAGGCTGCGGAACAAGTAGTCTGCAGGGTGAT |
| | | | | GTGAAGTTTGCGGAGGTACTTGGACAAATGGGTGCGGAA |
| | | | | GTAACATGGACTGAGAACTCAGTCACAGTTAAGGGCCCA |
| | | | | CCAAGGGATTCTTCTGGAAGGAAACATTTACGTGCTGTT |
| | | | | GATGTGAACATGAACAAGATGCCTGATGTTGCCATGACT |
| | | | | CTTGCTGTGGTCGCTCTTTATGCTGATGGCCCTACAGCC |
| | | | | ATTAGAGATGTTGCTAGCTGGAGAGTTAAAGAAACCGAA |
| | | | | AGGATGATTGCCATTTGCACAGAACTTAGAAAGTTGGGA |
| | | | | GCAACAGTTGAAGAAGGTCCGGACTATTGTGTGATCACT |
| | | | | CCGCCAGAGAAGTTAAACGTGACAGCAATAGACACATAT |
| | | | | GATGATCACAGGATGGCCATGGCTTTCTCTCTTGCCGCT |
| | | | | TGTGCAGATGTTCCTGTGACCATTAAGGATCCTTCTTGC |
| | | | | ACACGTAAGACGTTTCCTGATTACTTTGAAGTTCTTCAA |
| | | | | AGATTTGCCAAGCATTAATGTGATTATGGGTAGTGGTTT |
| | | | | GCTTTTCTATATGTAATTTTTGTTTCATTTGTAACGAGT |
| | | | | AAAATGTGAGTTTTGGGCATAACATATTCTTATGAACTT |
| | | | | GTATTCTTTCGTAAGATTTTTTTAGTGTAATAAAATATT |
| | | | | TTGCTATTTC |
| 65 | Conyza | cDNA | 1800 | GATTCAAATCCCACATTTACTACGTGTTTTCTCAACCAA |
| | canadensis | | | AATCCCCCCCGCCCCCCCACAAAACACACAATGGCAGTT |
| | | | | CACATCAACAACTCCAACATACCCATTTTCAACACTTCC |
| | | | | AATCTCACAACCCAAAACCCATCTTCAAAGTCATCATCT |
| | | | | TTTTTATCTTTTGGATCCAACTTCAAAAACCCATTAAAA |
| | | | | AACAATAATAACAATAATTATACCTCTGTTTCTTGTAAT |
| | | | | GTGAAAAACAACAAAAACCCATTTAAAGTATCAGCTTTC |
| | | | | TCTGCCACTTCCACCAAAGAGAAGCCATCTAAAGCTCCA |
| | | | | GAAGAAATTGTGTTGAAACCCATTCAAGAAATTTCGGGT |
| | | | | ACGGTCCATTTACCCGGATCCAAGTCTTTATCTAATCGG |
| | | | | ATCCTCCTCCTTGCTGCCCTGTCTGAGGGGACTACTGTT |
| | | | | GTAGACAACTTGTTAAACAGTGATGATGTTCATTACATG |
| | | | | CTTGGAGCTTTAAGAGCTCTAGGGTTAAATGTTGAAGAA |
| | | | | AATAGTGCAATTAAAAGAGCAATCGTAGAAGGTTGTGGT |
| | | | | GGTGTATTTCCCGTGGGTAAAGAAGCCAAGGATGAAATC |
| | | | | CAGCTTTTTCTTGGAAATGCAGGAACAGCTATGCGTCCA |
| | | | | TTGACTGCTGCCGTTACTGCTGCCGGTGGAAACTCAAGC |
| | | | | TACATACTAGATGGTGTTCCTCGAATGAGGGAGAGGCCA |
| | | | | ATTGGTGATCTGGTCACCGGTCTAAAACAACTTGGTGCA |
| | | | | AATGTTGATTGTTCTCTCGGTACAAACTGCCCACCAGTT |
| | | | | CGTGTAGTTGGAAGTGGAGGCCTTCCTGGTGGAAAGGTG |
| | | | | AAATTGTCAGGATCTATAAGTAGCCAATACTTGACTTCT |
| | | | | TTGCTCATGGCAGCTCCCCTTGCACTGGGAGACGTAGAG |
| | | | | ATAGAAATTATAGATAAATTGATCTCTGTGCCATATGTA |
| | | | | CGGATGACACTGAAGTTGATGCAACGGTTTGGGGTTTCA |
| | | | | GTAGAACACAGTGATACTTTGGACAGATTCCATGTCCGA |
| | | | | GGCGGTCAAAAGTACAAGTCACCTGGAAATGCTTATGTG |
| | | | | GAAGGTGATGCTTCAAGTGCGAGTTACTTCTTAGCTGGT |
| | | | | GCTGCCATCACTGGCGGAACTGTCACCGTGGAAGGTTGC |
| | | | | GGGACAAGCAGTTTACAGGGTGATGTAAAATTTGCTGAG |
| | | | | GTCCTTGGACAAATGGGTGCTGAAGTAACCTGGACAGAG |
| | | | | AACTCTGTCACGGTGAAGGGTCCGCCAAGGAATTCTTCC |
| | | | | GGAAGGGGACACTTGCGTCCAGTAGATGTGAACATGAAC |
| | | | | AAAATGCCAGATGTTGCGATGACTCTTGCTGTGGTTGCC |
| | | | | CTTTATGCTGATGGTCCCCACTGCCATTAGAGACGTGGC |
| | | | | TAGCTGGAGAGTAAAAGAAACGGAAAGGATGATTGCCAT |
| | | | | CTGCACAGAACTAAGAAAGTTGGGAGCAACAGTCGAAGA |
| | | | | AGGTCCAGATTATTGTGTGATCACTCCACCAGAGAAATT |
| | | | | GAATGTGACAGCAATCGACACATACGATGATCACAGAAT |
| | | | | GGCCATGGCTTTCTCGCTTGCCGCCTGTGCAGAGGTTCC |
| | | | | TGTCACCATTAAGGACCCGGGTTGCACCCGTAAGACCTT |
| | | | | CCCCGACTACTTTGAAGTTCTTGAAAGATACACTAAGCA |
| | | | | TTAAATCACATATAAGATGTTCAGAAAGAAAGGGGTTAG |
| | | | | AGGTTTTAAAATGACACCTTTACCCTTCAGTCCTTCACC |
| | | | | ATTATCTTTCTTCAGAAATGTTTCACTTACAGAGTTACA |
| | | | | TCATATGTATATGGGCGACCTGAGCGTATTTTATCTTTT |
| | | | | CTTTTC |
| 66 | Conyza | cDNA | 1730 | ATGGCAGTTCACATCAACAACTCCAACATACCCATTTTC |
| | canadensis | | | AACACTTCCAATCTCACAACCCAAAACCCATCTTCAAAG |
| | | | | TCATCATCTTTTTTATCTTTTGGGTCCAACTTCAAAAAC |
| | | | | CCATTAAGAAACAATAATAACAATAATTATACCTCTGTT |
| | | | | TCTTGTAATGTGAAAAACAACAAAAACCCATTTAAAGTA |
| | | | | TCAGCTTTCTCTGCCACTTCCACCAAAGAGAAGCCATCT |
| | | | | AAAGCTCCAGAAGAAATTGTGTTGAAACCCATTCAAGAA |
| | | | | ATTTCGGGTACGGTCCATTTACCCGGATCCAAGTCTTTG |
| | | | | TCTAATCGGATCCTCCTTCTTGCTGCCCTGTCTGAGGGG |
| | | | | ACTACTGTTGTAGACAACTTGTTAAACAGTGATGATGTT |
| | | | | CATTACATGCTTGGAGCTTTAAGAGCTCTAGGGTTAAAT |
| | | | | GTTGAAGAAAATAGTGCAATTAAAAGAGCAATCGTAGAA |
| | | | | GGTTGTGGTGGTGTATTTCCCGTGGGTAAAGAAGCCAAG |
| | | | | GATGAAATCCAGCTTTTTCTTGGAAATGCAGGAACAGCT |
| | | | | ATGCGTCCATTGACTGCTGCCGTTACTGCTGCCGGTGGA |
| | | | | AACTCAAGCTACATACTAGATGGTGTTCCTCGAATGAGG |
| | | | | GAGAGGCCAATTGGTGATCTGGTCACCGGTCTAAAACAG |
| | | | | CTTGGTGCAAATGTTGATTGTTCTCTCGGTACAAACTGC |
| | | | | CCACCGGTTCGTGTAGTTGGAAGTGGAGGCCTTCCTGGT |
| | | | | GGAAAGGTGAAATTGTCAGGATCTATAAGTAGCCAATAC |
| | | | | TTGACTTCTTTGCTTATGGCGGCTCCCCTTGCACTGGGA |
| | | | | GACGTAGAGATAGAAATTATAGATAAATTGATCTCTGTG |
| | | | | CCATATGTACGGATGACACTGAAGTTGATGCAACGGTTT |
| | | | | GGGGTTTCAGTAGAACACAGTGATACTTTGGACAGATTC |
| | | | | CATGTCCGAGGCGGTCAAAAGTACAAGTCACCTGGAAAT |
| | | | | GCTTATGTGGAAGGTGATGCTTCAAGTGCGAGTTACTTC |
| | | | | TTAGCTGGTGCTGCCATCACTGGCGGAACTGTCACCGTG |
| | | | | GAAGGTTGCGGGACAAGCAGTTTACAGGGTGATGTAAAA |
| | | | | TTTGCTGAGGTCCTTGGACAAATGGGTGCTGAAGTAACC |
| | | | | TGGACAGAGAACTCTGTCACGGTGAAGGGTCCGCCAAGG |
| | | | | AATTCTTCCGGAAGGGGACACTTGCGTCCAGTAGATGTG |
| | | | | AACATGAACAAAATGCCGGATGTTGCGATGACTCTTGCT |
| | | | | GTGGTTGCCCTTTATGCTGATGGCCCCACTGCCATTAGA |
| | | | | GACGTGGCTAGCTGGAGAGTAAAAGAAACGGAAAGGATG |
| | | | | ATTGCCATCTGCACAGAACTAAGAAAGTTGGGAGCAACA |
| | | | | GTCGAAGAAGGTCCAGATTATTGTGTGATCACTCCACCA |
| | | | | GAGAAATTGAATGTGACAGCAATCGACACATACGATGAT |
| | | | | CACAGAATGGCCATGGCTTTCTCGCTTGCCGCCTGTGCA |
| | | | | GAGGTTCCTGTCACCATTAAGGACCCGGGTTGCACCCGT |
| | | | | AAGACCTTCCCCGACTACTTTGAAGTTCTTGAAAGATAC |
| | | | | ACTAAGCATTAAATCACATATAAGATGTTCAGAAAGAAA |
| | | | | GGGGTTAGAGGTTTTAAAATGACACCTTTACCCTTCAGT |
| | | | | CCTTCACCATTATCTTTCTTCAGAAATGTTTCACTTACA |
| | | | | GAGTTACATCATATGTATATGGGCGACCTGAGCGTATTT |
| | | | | TATCTTTTCTTTTC |
| 67 | Conyza | Genomic | 7954 | GTGTTTTCTCAACCAAAATCCCCCCCGCCCCCCCACAAA |
| | canadensis | | | ACACACAATGGCAGTTCACATCAACAACTCCAACATACC |
| | | | | CATTTTCAACACTTCCAATCTCACAACCCAAAACCCATC |
| | | | | TTCAAAGTCATCATCTTTTTTATCTTTTGGATCCAACTT |
| | | | | CAAAAACCCATTAAAAAACAATAATAACAATAATTATAC |
| | | | | CTCTGTTTCTTGTAATGTGAAAAACAACAAAAACCCATT |
| | | | | TAAAGTATCAGCTTTCTCTGCCACTTCCACCAAAGAGAA |
| | | | | GCCATCTAAAGCTCCAGAAGAAATTGTGTTGAAACCCAT |
| | | | | TCAAGAAATTTCGGGTACGGTCCATTTACCCGGATCCAA |
| | | | | GTCTTTGTCTAATCGGATCCTCCTTCTTGCTGCCCTGTC |
| | | | | TGAGGTATCTTTTATAAATTATGTTTTGAATATTTGAAT |
| | | | | TTAATTAGTGTTTTGATTGATTGACTAGAATTTGATTAT |
| | | | | TATTAAGATATAGGAAAAGATATGTACATTAGTTTTTGA |
| | | | | CTGAATGTGAAAAATGTCTTAATGTAGTAACTCACAAAG |
| | | | | TTTTGTTTGTGATCTATAAGTTTACTTTATAAGGTTACT |
| | | | | CTATGGGAAAAGGTTACGTAGATTTTGGTTTTCTTTGAC |
| | | | | CTCTGTAGTTGGTATGGCCATGAGAAGAAGTAGGCCTAA |
| | | | | AAAGAGCTTTGCTTGTGAGAGGACATGACCATACTTAGA |
| | | | | GGACTAGGATTAGTTTAGAGGAATATGGTAGATCAGTAA |
| | | | | TCCTTTTAGGTATTTTAGGGGTAGTCTATATACTTATAT |
| | | | | GTAGGAAGGTCAGGCATGATACCTTTCTTATATGCTCGT |
| | | | | ATACTCGTAATTGTTGCTCTCAGTCCATTTGCTTGGTTT |
| | | | | TATGCAAACGGTTATGTTTATTATGTTTTTATACTGATG |
| | | | | TCTAATATGTTCAAATGTCCTATCTACTATGTATTGTCC |
| | | | | ATTTTGCGCTAAAGTGTCCTACGTGGTATGTTTGCTACT |
| | | | | CCCCTTTACTCTTAACGTAGGCAGCTCATACCCGACCGA |
| | | | | CAAGTATGGTTTGCTTAACTCTTTACACTCTCCTACTTT |
| | | | | TGCATCATATGGCCGGAGGTCCTTATGGAAGCAGTCTCT |
| | | | | CTACCTTTGGGTAGAGGCAAGATTGTCTACATCTCACCT |
| | | | | CCCCCATACCCTGCTCACTGTGTTGTTTAGTTTATTTAA |
| | | | | AGGTGGAAAGGAAAGGAGATGAGAGGAGAAATATATAAG |
| | | | | ATGCATTCTTAAGATTTTTTTAAGTGTGGAAAGGGAAGG |
| | | | | AGTAGAAAGGATTAGAGGGGGAAGTTGATATGGATCTGC |
| | | | | GGGAAGTTTATATTATTTAGTAATATAATATTAATTTTA |
| | | | | TTATTATTATGATTAGGAAAGTATTGTCTTTACTTAGAT |
| | | | | ATCTTATGATRTCTTTTATATTATTTAGTTAGCTTGATC |
| | | | | ATCAAGCTATAGGATTAGTATAAAAAGAATATTAGGGTT |
| | | | | GTAATTCTAAAGTATGAAATATTAATCAGAAGTTTATTG |
| | | | | TTCTTGTTTAATCAATTTAGGAGTTTACTGGTTCTCGAA |
| | | | | TACCAGCCTATCTTTGTTATTGTTCTTATCATTTGATAC |
| | | | | AAGCCATTGGTTCGTATCAATTGGTATCAGAGCATCGAT |
| | | | | CTTGCAACCTGTGCTTTTCTTCAACTATGGAATCAAGGA |
| | | | | CGATCATTGATGTTGATGCTGATGTACAGCAATACCGTG |
| | | | | AATCTACTGAGGCTTGGGTGGACATAATGCATGCTCGGA |
| | | | | TCAATCGTTTTCAAGCAGCCACCGCGCGATCTCAGTTGG |
| | | | | CCACTCAACAATTTCACTTGAGGTTTACAACTAGGCTGG |
| | | | | ATAAACTTGAACCAGTTGTAGTTGGGACACAGCAGAAGT |
| | | | | TGGATGCATTGGCGGCAGTGGCAAACCAGCCTCTACCCC |
| | | | | AGCAACCGATGATTCAGGAAGTTGTCATACCAACAGTCC |
| | | | | CTACAACTTCACCAAAAACAAATCAGTTTGGGTTGAAGC |
| | | | | AATCGAAGGTTTCACAAGCAGGGTATCCTTATCCCAGAC |
| | | | | ACCTTCAGATCTTGCAAGGAATAATCATCCTGATGTGAA |
| | | | | CCAAGAACGAGGAGCTGGACTAACATTCAAGGACATAAG |
| | | | | CAATGCTTATGAAGATCTGGCAGGCGATGAAAAGCGATC |
| | | | | CATATATGACATGAATGGGGAGAATGGGCTTAAAGGTAC |
| | | | | ATGTTTTGGTTTAAGGAATTGTGCAAAAGCTGATGAACT |
| | | | | TTCTGGTTTGATACATATGATTGAGTTTGTTAAACAACT |
| | | | | TCGATATGATCAGCAAGCTATGGAGTTTCAAGTCAGAAT |
| | | | | TTGGGATCCTGGAATTACTCGAAGGAACAATTTAAAGCA |
| | | | | ACACCTTGAGGACAAGGTGTTTTTGGGGTGGGAGTAATG |
| | | | | ATATGGATCTGCTGGAAGTTTATATTATTTAGTATTATA |
| | | | | ATATTAATTTTATTATTAATATGATTAGGAAAGTATTGT |
| | | | | CTTTACTTAGATATCTTATGATGTCTTTTATATTATTTA |
| | | | | GTTAGCTTGATCATCTAGCTATAGGATTAGTATAAAAAG |
| | | | | AATATTAGGGTTGTAATTCTAAAGTATGAAATATTAATC |
| | | | | AGAAGTTTATTGTTCTTGTTTAATCAATTTAGGAGTTTA |
| | | | | CTGGTTCTCGAATACCAGCCTATCTTTGTTATTGTTTGA |
| | | | | TACAAGCCATTGGTTCGTATCAGAAGTTTAGTTGTTTTT |
| | | | | TGTCTCAAAAGTTTTCCCCTCATTTTTGAGGTGATTAGG |
| | | | | AAGGAAAACTTCTCTTCCCTCTCATCTCCTTTCCTCCCT |
| | | | | TAAGTTAACTAGACATTAATGAATATTGGGTCATTTTGT |
| | | | | TGTTGTGGCTATAAGGAATGACTTGACTTAAAAACTTAT |
| | | | | AGAAATGCTGTGTTATCCAGTAAGTAATCGTTTTTTTAC |
| | | | | TATTTGTCTTTTAAGACCATTCATTAAGCACATAAAACA |
| | | | | AACAACAATCCTGCTTAATCGATGTAGACTACATACATG |
| | | | | TAGACGGACATTTTATCCATAAACAGCTAATTAGTCATA |
| | | | | CATAGCCAGTTATATGTTTTACATCGTGCAGTGTAAAAC |
| | | | | TTCTGCCTTTACTGCTAAGATTTTTTGTTTACATATATA |
| | | | | TTAGATATATTAAGGTTTGTATTTTGATGCTAACATTTA |
| | | | | ACATTACTTTTTTTTTTTATCGGGGAGTGGGTTAAAGTG |
| | | | | GTTCTTCTACCTGGTTTTAGTTTTTTAGATGTATATCCA |
| | | | | ATATTTATTGTGGGTAATTTAAAGTTTTGAAATTTTTGT |
| | | | | TTTTTTTTGTGAACAGTATAAAGTTTCTGACTTTTTTGA |
| | | | | TTTTTTGTGAGGTAAAGTCGTGAATGTGTAATTTGGTAT |
| | | | | TTGATTGATATTCTTGATATTGGTACATAGTGAGGTGCA |
| | | | | AGGTGCTGATGGTTTCTTAGACGGGTCATGTTTGTTTTG |
| | | | | TGTAAAATACATCTGTTTTTTTCTTTGATAACAAGTTAT |
| | | | | AGAAGTTGCACCCAAAAATGTTCTTGTTAAAGCGATAAA |
| | | | | AATTTGGATAGAAGGTGACGGTTAATGATTCGATATATT |
| | | | | GATTTGAGTTTCCTTTTATCTATTGCATTTTCACAAGTT |
| | | | | CAACATTCCACCCTCGATTTTTTGATGAATCTATGACTG |
| | | | | AAGAAAAGGGCGATTGTTGCCTTTGGCAATCAGTTTTGG |
| | | | | ATTTTATTTTGTCATGGAAAGGGGGTGTTAGTTCCTGAA |
| | | | | CCTTAGTAGAAGATGATAAGCTATAGTTTCAATATTGCT |
| | | | | TTTCTTTCTTGCATCTGAACTGGTTTTGCATTTTTCAAA |
| | | | | GGACTATAAAAGATGCTATTTATCACCTATGACCTATGT |
| | | | | TATAAATAGTAAGGTATTAAACTATTAATATTGGTATAG |
| | | | | TCTTGAGAAATCCATGAATTTCGATTGAGTTCATAGGAC |
| | | | | ACATCTAACTTATGTTTCTTTACATTACGATTTACACAT |
| | | | | CTTGTCTTTGACGTCTGATTTTAAAATAGCGTTTCTATT |
| | | | | GACATTATGCATTTCTTTGAGTTCTCTATATAAATTTTT |
| | | | | GTAAGCTTTCCATATGTATATACTATGAATCTGAGTGAA |
| | | | | CTTATGCTATCAGGGGACTACTGTTGTAGACAACTTGTT |
| | | | | AAACAGTGATGATGTTCATTACATGCTTGGAGCTTTAAG |
| | | | | AGCTCTAGGGTTAAATGTTGAAGAAAATAGTGCAATTAA |
| | | | | AAGAGCAATCGTAGAAGGTTGTGGTGGTGTATTTCCCGT |
| | | | | GGGTAAAGAAGCCAAGGATGAAATCCAGCTTTTTCTTGG |
| | | | | AAATGCAGGAACAGCTATGCGTCCATTGACTGCTGCCGT |
| | | | | TACTGCTGCCGGTGGAAACTCAAGGTATTTTAACTTAGT |
| | | | | GTTATATTCTCCTGCATTTTATGTCTGCTTCATCCTCCT |
| | | | | ACACATACATTTCATGACATGTGTACCCATTTCTCTCAC |
| | | | | CTCATCATTTCATTTTTCTATGTGTCACAATTATATGAG |
| | | | | TAGGAGGATTCATACTTTCATAGGCATAAATTGTAGGAA |
| | | | | TCAAATATCGTTTCTTTTTAACCTAACATCTCTTGATTA |
| | | | | GCTATTATAATCCGTAGAACGTATATTAAAGTTTTTTGT |
| | | | | GCCGATATGTAATTTTAAGGTGAATACACAAATAAAAAT |
| | | | | TTTACCTTTCTGTTTGTTGCATGTTCTGTACATATAAAT |
| | | | | TTTTAGTTTTTGTTATATATCTAAGAATCTAAGATCTCT |
| | | | | AAATATTCTTCTATTAGTTGACACAAATTAAGGGATCAC |
| | | | | ATGAACTGAAAACTCAATAGCATCCACTTGTTGATAATG |
| | | | | CTGCAATTTAATGCCCAAAGAAGAAATTATTGCAATTCT |
| | | | | TATTATCATTTTATTTATGGGAGACAGTGAGTATGAATT |
| | | | | TGGGAATCGATAATAGAGTTGACCAACTTGGTGGTGCTG |
| | | | | GGTAGCTAAGGTAGTGGGTAAGTTACATTGATATGTAAT |
| | | | | ACCCTAACAGTTATGAGTTTTTTCTTCAGCTACATACTA |
| | | | | GATGGTGTTCCTCGAATGAGGGAGAGGCCAATTGGTGAT |
| | | | | CTGGTCACCGGTCTAAAACAGCTTGGTGCAAATGTTGAT |
| | | | | TGTTCTCTCGGTACAAACTGCCCACCGGTTCGTGTAGTT |
| | | | | GGAAGTGGAGGCCTTCCTGGTGGAAAGGTAATCAACAAT |
| | | | | AAGATTGCTGCATTTTAAAGTCGTAAGAATTAATTATTT |
| | | | | GGTTCCATATATGATTGGAAAATTTGGTTATTTAAGAAA |
| | | | | CTATTAATTAGTAATGAAATTATAGTTTTTGAATCTTTT |
| | | | | TGTAATCTTCTTTCCCTGGCCTTCTTATTGCAGGTGAAA |
| | | | | TTGTCAGGATCTATAAGTAGCCAATACTTGACTTCTTTG |
| | | | | CTTATGGCGGCTCCTCTTGCACTGGGAGACGTAGAGATA |
| | | | | GAAATTGTAGATAAATTGATCTCTGTACCATATGTGGAG |
| | | | | ATGACACTTAAGTTGATGGAGCGGTTTGGGGTTTCAGTA |
| | | | | GAACACAGTGATACTTGGGACAGATTCCATGTCCGAGGC |
| | | | | GGTCAAAAGTACAAGTAAGTTGATCATTTCATAAAAGTC |
| | | | | AATYTTTACGTGAAGATCGGTCAACATCTATTTTAATCC |
| | | | | GATAAAATCTCTTTAGGTCACCTGGAAATGCTTATGTGG |
| | | | | AAGGTGATGCTTCAAGTGCGAGTTACTTCTTAGCTGGTG |
| | | | | CTGCCATCACTGGCGGAACTGTCACCGTGGAAGGTTGCG |
| | | | | GGACAAGCAGTTTACAGGTATTATCCATGTGCCCACCTC |
| | | | | AAAGATATTCAAAAACTAAATTGTTTCTCAAGTATATAT |
| | | | | TCTTCTAGTTAATTGCAAATTTTTTTGCCCCATACGTCT |
| | | | | ACCCATTCTATAAATTTCGTCCAAAGTTGGTGACTCGGT |
| | | | | TCAATCGTGTAATAAGTCTCTTTTTTGTTTTTTAGAATT |
| | | | | GACAATTTATGTCAGTTCTTGGTTATATCAACGATGTGG |
| | | | | GGAGTGTATTGTGCACACATTCTAAAAGAAGGACATTTA |
| | | | | GTCTTTTTGCTTTCTTTTTGCCTCAAGATCATCTTCATC |
| | | | | TTTTCAAGATACTCTGCACTCATTTGCATTATCAAAGTT |
| | | | | TTGGATGCATTCTGTAACTGTGGTACAAGGAGGGAGACA |
| | | | | TAATATGTCATTAGTTCTTATTCTTAAGCTCAATGCACA |
| | | | | CTATCACCTCTTACTTCTTTTTTCTTTCTTTTTTTTTAT |
| | | | | TAGTTTATTTAAGCTCAATGCACACTAACACTTCTTCTT |
| | | | | TATAACTTCAAGTCATTCATTTTAATTTTTGAAGCTGAT |
| | | | | GGTTTTTGACATTAAAGATAGAACTATGTATATACATAT |
| | | | | GTCATTTCATCTTACCTATTTGCATGTCTTGTTGATCTT |
| | | | | TAATCAGGGTGATGTAAAATTTGCTGAGGTCCTTGGACA |
| | | | | AATGGGCGCTGAAGTAACCTGGACAGAGAACTCTGTCAC |
| | | | | GGTGAAGGGTCCGCCAAGGAATTCTTCCGGAAGGGGACA |
| | | | | CTTGCGTCCAGTAGATGTGAACATGAACAAAATGCCGGA |
| | | | | TGTTGCGATGACTCTTGCTGTGGTTGCCCTTTATGCTGA |
| | | | | TGGCCCCACTGCCATTAGAGACGGTATGTGTTAGAATTC |
| | | | | ACCACAGCTTTGTAATGTTAAATATATGTTAGTTTAGAT |
| | | | | TAACAAAATGACTATATGATCACAAAAGGAAACATTTAT |
| | | | | CTCAAATTTGGAACTAATATAGTATCATACCTATATAGC |
| | | | | AATTGTAGTTTCAAAGAAATCCTTAAGGTCGTGTTGTTT |
| | | | | ATTATACATGACTGGGTATATATTGTTTTTTGTGCTCAA |
| | | | | GCTTTTAAAAATCACATTTGACTATCCTTTATTGAAAGG |
| | | | | TTAATTTTGTTCATGTCTCATTTTAGGCAATTTACTTTT |
| | | | | TATCAAGGAAAAAATAGCAATCAATGTCTATGGTCGTAG |
| | | | | TTTAGGCAATTAAAACCCATCAATCAAAGTGCTGTTGGT |
| | | | | TCAAGGCATATTTAGAGATAAATGGAGATAATAGTACGT |
| | | | | GGATGTCTTTTCAAAAGAAGTACAAACTTTTTCTTGGGC |
| | | | | TCTTTAGTTTTTACTGAAAATACCAAACTCCTTTAACTG |
| | | | | AATTGTCTAAAATAGAAGAAACTGGAAATTAGTTGCTAT |
| | | | | TTTGTGAAAACGAAAAGTAAATCGCCAAAAATTGGAGGT |
| | | | | TAAGTATGCTTATATTTTATGTAATTCATCTTTTTGAAA |
| | | | | AATGTAAGAACTTAAATGGAAGTGAATTGATTTGAAAAA |
| | | | | TATATATTAAAGCACCACTTATGAAGAAATCTAGAAATT |
| | | | | GAGTTTTAGGATCTGTAAAGACATCCTGTATATTGTATG |
| | | | | AGAATAGATATATCGTACACCACAATCCATCATTTTTAC |
| | | | | TTTTCACACGACAAAGTGAATATGAAAAAATGTGAGTTA |
| | | | | AAACACTTAAAAGGCAGTTTTGGGTGTGCAAAGTAAAAT |
| | | | | GTAGCACAAATTGGCCCCTTTCTCATATTGGGTTTACAT |
| | | | | ATTCTTCTTTACGTATATCCCTATATTGTTCATTTTGTG |
| | | | | GGCCCCATCTCACGTCGGTAAATCATTAGATGGACTAAA |
| | | | | TCATATTCTTCATTCCTTATATTGGGCAGTGGCTAGCTG |
| | | | | GAGAGTAAAAGAAACGGAAAGGATGATTGCCATCTGCAC |
| | | | | AGAACTAAGAAAGGTACAAGTCATTAACCCATCTTACTC |
| | | | | TAAAAAATAGAATGGCCATGAGTACTTTTAAAGTACTCA |
| | | | | ATGAATCTGCCCATTATTTGTTTAGTGCTAATAGGCCCT |
| | | | | TTTGCCCTTGGAACTTTTCAGTTGGGAGCAACAGTCGAA |
| | | | | GAAGGTCCAGATTATTGTGTGATCACTCCACCAGAGAAA |
| | | | | TTGAATGTGACAGCAATCGACACATACGATGATCACAGA |
| | | | | ATGGCCATGGCTTTCTCGCTTGCCGCCTGTGCAGAGGTT |
| | | | | CCTGTCACCATTAAGGACCCGGGTTGCACCCGTAAGACC |
| | | | | TTCCCCGACTACTTTGAAGTTCTTGAAAGATACACTAAG |
| | | | | CATTAAATCACATATAAGATGTTCAGAAAGAAAGGGGTT |
| | | | | AGAGGTTTTAAAATGACACCTTTACCCTTCAGTCCTTCA |
| | | | | CCATTATCTTTCTTCAGAAATGTTTCACTTACAGAGTTA |
| | | | | CATCATATGTATATGGGCGACCTGAGCGTATTTTATC |
| 68 | Conyza | Genomic | 6988 | GGCTGGTGTCATGGCTTAATAACTGTRATGACATTTTGG |
| | canadensis | | | TGATGCGTAAGACCTGTAAGCACCAGCACAAGTCTAAGT |
| | | | | CTTGAATCTTATACAAATASGTTTTTTTCTATTTTCCAA |
| | | | | ATTTATTGAGTTTTCTCRTGAGTTCATGTATGAGCATTA |
| | | | | TTGCATAGTGAAAATATGGTCAGATGGTTTCATCGATGA |
| | | | | CAAGCTAATTTTTAAGAAAGATATATTACTTTTCTTTTT |
| | | | | AACTTCGGGAAAATCATAAAAGTGAAATCATCGTTTTAA |
| | | | | CTTTTTACGAGCATGGTACTCGCGTAATGCAGCGGCGGT |
| | | | | GGTATAGAAGACGGTCTAATGGTGGCAGTGTCAAGTGGT |
| | | | | GTAGGTCTATGTGCACCGAAACTCCAAACTGACATAGCC |
| | | | | GTACCCATTTCCGAAACTCCATGGAAACGTTTTCTCTTA |
| | | | | CGAAACACGTATGAAACATTCCCTAAAATTTTCTATAGA |
| | | | | TTAAACGTTTCTTTGAAGTTTCCATACGGTTTCTAATTA |
| | | | | ATATCAAGGTTTTAAAGGACTTTTTCGAATCCCCAAACC |
| | | | | CAAACATGTTATATTATATACAATTTGATCAACATTAAA |
| | | | | TTTTTTATATTACAAAGCCATTATTAAACACTAAACATT |
| | | | | CAATGAGTGATCACTAATCAAACATGTATTATAAAGTTC |
| | | | | TACATATATAATTATACATAATCTCTCAAGTCTCAAATC |
| | | | | TCCTTTATGAAAAAATTGATATAATTTATATTTGTATAT |
| | | | | TTTTTTTATTGTTGTACCCGTATCCTGGATTTTTTAGTT |
| | | | | TTACTGTTCCCCGTTCCCGTATTGTTCCCGTACCCTTTT |
| | | | | CCCGTACCTGTTTCGGTGCTACATAGGTGTAGGTTGATG |
| | | | | TAATTGTGATAGTGAAAAGTTTTAGAAGATAAGAGTTTA |
| | | | | AAGTGTTAAGTATTAAAATAAGGGTTTATGGTGTAAATT |
| | | | | AATTCATTAAGGGGAAAATTTATAAAACTATTTCTATAG |
| | | | | TGGGTTTTTATTAAGAGACAATTTAGTAATTTTATATGT |
| | | | | GACATATGAGTAACTATTTTTATTTTGAGAGGGGTGCAT |
| | | | | AATTTTTATTCGAAGAGTACGGATAAAAGTCAATAAATT |
| | | | | ACGAGCAGTGAAGTATCCCAGACACCCCTTGCAAGGTAA |
| | | | | TTTTTTAAAATTTTATTCATGGAGGTTTGGTAGGAAGTG |
| | | | | GTGGTGGTGGTGGTTGGTATGAAATTTTGTTTTTGACCT |
| | | | | TCTTCAAACATCCACCTACTACTGACCCCTCCCTTCAAA |
| | | | | CCCAACCCAAAATCCAAATCATTAAATCCTTCAAACCCA |
| | | | | CTGTGTGTTTTGTGTGAAATTTCACACACAACAAACAAT |
| | | | | GGCAGCTACTCACATTAACACCACCAACATTGCCCACAA |
| | | | | TCTCCAAGCTACCACCAGTCTTTCCAAAACCCAAACCCC |
| | | | | ATCAATAAAGTCACAACCTTTTTTATCTTTTGGGCCAAA |
| | | | | ACACAAAAACCCGATTGCCCATTTCTCTGTTTCTTCTAA |
| | | | | TAATAATAGAAATCTTGGAAAAAAATGTTTAATAGTTTC |
| | | | | TGCCGTTGCCACCACCGAGAAACCGTCAACGGTGCCGGA |
| | | | | AATTGTGTTACAACCCATTAAAGAAATCTCGGGTACGGT |
| | | | | TAATTTACCCGGGTCCAAGTCGTTGTCTAATCGGATCCT |
| | | | | CCTCCTTGCTGCGCTTGCTGAGGTATAGTTTAATTTGGT |
| | | | | AATAATGTTTGACCTTTAAAATTTGACATTTGGGCTACA |
| | | | | TGATTGATATGGGTCTTGAATGAATTGTGTTATAAAATT |
| | | | | TGGGAAGTTAAATGTTAATAATAGTTTAATCCTTTAGAA |
| | | | | ATTATGAAGTAATGGTTTTAGACCCTGAATTTTTTTTTA |
| | | | | TTGCATAGGTTAGTCCCTTAGCTAGTTAGCTTTTGGTTG |
| | | | | ACATCTTAGAAAAACCAGTACAGTTTTTATATTTTAGTC |
| | | | | CTTAAGCTTCAATTTTTTGCAATGTATTGCCATTTGAAA |
| | | | | TGATCTAGTAAAATGTTCAAAATCAATGAATTGGCGGTT |
| | | | | TAAAGATATAATGCTTGGATCAATTGTTATGTAAAGTGT |
| | | | | GCTAGGCGGTCAAAAGCGAATCTTGGATCAAGGAAGTCG |
| | | | | TAGAATACTATTGATTTCATATTATTGATTTCTTATTAT |
| | | | | GCATATTTGACATGTGCTTCTAACATCATGGCATTTGGG |
| | | | | ATTTATTTCTATATATAAAGCATGACTGTATGGTTATAA |
| | | | | AGTTCAAAACTTGTATGGTATAAATATACTCTTCTTACT |
| | | | | TCTTAGCAGGAATGTGTTGACTTATAAGCTGAAAACTTT |
| | | | | TATAACTCCAATTGTGTGTAGTAATACTTGAAAGTGGCT |
| | | | | GAGTTCCTAGGACAGTATTACATGCGAACACTACAACGT |
| | | | | GTTACTAAATTTGAGATAGGTATGATTTGGTTTTGTTGG |
| | | | | ATACAAAGTCTAGGTCAGTTAACATAGCCAGTTGAGGAC |
| | | | | GATAGCTTTCTTGTCTTATTTCCTTTTTATAGAGGGTTT |
| | | | | GTGTTTCGTGATGGTAATATTGAGTACCACCATATAGTT |
| | | | | CACAAGTCATATAATAAAATCAGAGCAACATTCGAGGAG |
| | | | | TCGCCTATATGCATATTATTGCACCATGCTAAAATCCAA |
| | | | | GGGCATATTTTGATGCCAATTTGTAATTTATTTCTCAGG |
| | | | | GAACGACCATTGTTGACAACTTACTCAACAGTGATGATG |
| | | | | TTCATTACATGCTTGGAGCTTTAAGAACTCTAGGGCTAA |
| | | | | ACGTTGAGGAGGATGTTGCAATTAAAAGGGCAATTGTGG |
| | | | | AAGGTTGTGGCGGTGTGTTTCCTGTGGGTAAAGAAGCTA |
| | | | | AAGATGACATACAGCTTTTTCTTGGGAATGCAGGAACTG |
| | | | | CTATGCGTCCATTGACTGCCGCAGTTACTGCTGCTGGTG |
| | | | | GTAATTCAAGGTATTTGGACGTTGTCATTGACTCATTGC |
| | | | | TATAGTAAATATATGTTGACTTGTGCACACAAGATTTGA |
| | | | | AGCATCTTTTAAACATATATGATTAGATACAGAGAACAC |
| | | | | TGCATGTTGAAAACTTGAAATACAGGACTTTCTTAAAAT |
| | | | | ATTGGGATTTCACATATATGGGTTGAATAGTTGAAATTT |
| | | | | CCTCCTTCTACCTTTAACCAATTGTATATTACTTATTTA |
| | | | | AAGTTGTGTTTTAAACATGGCGATATGATTAGATACAGA |
| | | | | GAACACTACTTATTGAAAGGTTTATGTGGTATAGTATGA |
| | | | | ATTTTAACCTCAAAAAGGGTATCTCACTATCTCTTCATA |
| | | | | TAGAAGCACACATCTGATTCTGTTATATCTTTATGGATC |
| | | | | ATTTTTTCCAGCTACATACTAGATGGCGTTCCTCGTATG |
| | | | | AGAGAGAGACCAATAGGTGATTTGGTCACGGGTCTTAAG |
| | | | | CAGCTTGGGGCAGATGTTGACTGTTCTCTCGGGACGAAC |
| | | | | TGCCCTCCCGTGCGTGTAGTTGGTGGAGGTGGTCTCCCT |
| | | | | GGAGGAAAGGTATTGTGTTTTCATTAGTAGTTGTTTTCT |
| | | | | ATGCAAATAGCAACACACCTTATATATCATCCATTTATA |
| | | | | GCTATTTTTCTAATTGGGGCGTACGTTACTGTAATTTGA |
| | | | | TCGTCCAACCAGTTGTCATGACCCTCCTTAGCTAAAATG |
| | | | | GATGAAAGCTGGTCCGACAATTGACCATAATAAATGGGT |
| | | | | GTGGGCTATCTTGCTAAATTTAAGTATTTCACTTAAAAT |
| | | | | GAGAGTTGGTTTACAGTGTGCATTCAACCTAATTTTTTT |
| | | | | TTTTAACGTCGCATACAACCTAAAATTGAATAATGTTGT |
| | | | | AGACACAAAAGCTCTTAGTGAGCTTTAATAGTAACATTA |
| | | | | GAGGTGGTGATATCAATCAAACAATAAGGGAAAAGTAAT |
| | | | | ATGTATAAAAATTAGAATTAAACAAGAAGTTTTAAAAAA |
| | | | | TAGATCAAATGGTTTGAAAGTCTTCTAAAGTGTAATTTA |
| | | | | ATGCATAAATCTTCCTAAATTATTTTATTTAAAAACTGT |
| | | | | ATTGTAATATAATTTTCATCATCATATTTGACATTCTAT |
| | | | | GAAAACAAATATACATTTTGAACAAACAGTGTTACGGAT |
| | | | | CGACCCAGGCAATTCAAAGCTGTCCATTCTAACCTAAAC |
| | | | | CAGTTTTCACGGTTACCTCTATTTTCCTGCCTTTCAATT |
| | | | | TGCCAGCTACAAGAAGCTTCATTCCACCATAACGGGTTC |
| | | | | ACGCTAAAGATGCAAAGAGTCATGATTCGTTATTTATTA |
| | | | | TCTTGACTTATTATGATAACAATAGTTTTGGTGTATTTT |
| | | | | GATGTCTTCAGGTTAAGTTGTCGGGATCTATTAGTAGTC |
| | | | | AATACCTTACTGCTCTGCTTATGGCTTCTCCCCTTGCCC |
| | | | | TTGGGGACGTGGAAATTGAAATCATAGATAAACTAATTT |
| | | | | CCATACCATATGTCGAGATGACACTGAAATTAATGGAAC |
| | | | | GGTTCGGCGTCTCGGTAGAACATAGTGATAGTTGGGACC |
| | | | | AGTTCTTTATTCGAGGCGGCCAAAAGTACAAGTAAGTCT |
| | | | | ATTTCTTTCTTTTTAAAGTAAAACTGGAATTTAAAAAGG |
| | | | | TTGCAGTTTCTACCCTATCTCTTGTAATGGGTTGATTCA |
| | | | | GGTTATGTATAATCTCTAATGGGTCAAAGGGGGTAAAAT |
| | | | | ACAAAAAGGTTATTTTGTCACCAAAACGATATGATGCAT |
| | | | | ATTACCTAGTTTTCTTATTGGAATAGTAAACATTTTTAA |
| | | | | TCATTTCAATGTACAACTCTTTTATGTGTCCACAGAAAT |
| | | | | TAAACATAGCCCCTAGGACTATGTTCATCATTTCCCTTT |
| | | | | ATAAACTAGTTGGAGAAAAGTATTTTGGCCAACCCATTC |
| | | | | CGAATTTACACATTTTGGCCTATCACCCAGCCCGTCTGT |
| | | | | CCACTCATTTTCAGGGTTTTGTATGGAGACCCGTTTGTT |
| | | | | AATTAGTTGGATTAATTATCTTCAGGTCACCTGGAAATG |
| | | | | CTTATGTAGAAGGTGATGCGTCAAGTGCGAGTTACTTCT |
| | | | | TGGCTGGTGCTGCCATAACCGGAGGCACCATCACCGTTG |
| | | | | AAGGCTGCGGAACAAGTAGTCTGCAGGTGCACTTTGACC |
| | | | | TCCTTTGTTTTTTATTCTTCTCGATTTCAATCAAACGGC |
| | | | | TTTACGGTTTTACATTTTAAATGGATTTTGTGGAAACAA |
| | | | | CGAGTATTAAAAGTTCATCAAAAGATTTTATTATTATTT |
| | | | | TTATGCAACAATTATCAGCATCTGTAGTGAAATATTCAG |
| | | | | AAGTCCGTTTTTAGTTCAAAGTTTTTCTTTTTAACCTTA |
| | | | | AAGTCAAAAGTGAGATGGCAAATCTTTTACGTAAAATGA |
| | | | | TTCAATTGAGGCTGTACTTTGGTCGATTCTGACTTAATT |
| | | | | GGGAACATAGGTTACGTTAGCTATAAGCCTATAACTATA |
| | | | | AGTAAGCATGTGTTTATATGTCACAATGACTTGATTAAA |
| | | | | AGTAACCTTATGATTTTCTTAGTATACGTTAGTAATCTA |
| | | | | ACAGTATCATAATAACGGACAAAAATGTGCTGGTGGATC |
| | | | | AGCCCACCCAGCCCGTTAGAACATGACATAAAAATGACC |
| | | | | CAACTTGACCTATCACCTAAGCTCATTATAATATGTTAT |
| | | | | CCAACCCACCCTATCTTGGCCACCTGTGACCTGTATTCA |
| | | | | AATGTATACTGTAAAGCAACTTCCTGTTTTTCTTAAAAC |
| | | | | ATGTATTCTGTTTTTTCTTTCCAATGAAAGGGTGATGTG |
| | | | | AAGTTTGCGGAGGTACTTGGACAAATGGGTGCGGAAGTA |
| | | | | ACATGGACTGAGAACTCAGTCACAGTTAAGGGCCCACCA |
| | | | | AGGGATTCTTCTGGAAGGAAACATTTACGTGCTGTTGAT |
| | | | | GTGAACATGAACAAGATGCCTGATGTTGCCATGACTCTT |
| | | | | GCTGTGGTCGCTCTTTATGCTGATGGCCCTACAGCCATT |
| | | | | AGAGATGGTATCCTTCCTTTTAATGTGGAAAAAAGTTCA |
| | | | | ACATGTTTTCACTAAGTTTTCAAAGTAAATAGATAGATA |
| | | | | TGACTTCAAAATAACTCTATTGCCATGTTAAATCTTACA |
| | | | | CATATTGCAAGCACATTCTAGTGGTGGTTTGGAATGGCA |
| | | | | TTATGAAATTGAATATCTAAAATATTTAATTTAAACATG |
| | | | | TTCGGTTTCTGATCATTTAGGGTCAGTTTTAACTGAATC |
| | | | | TCAGAGAAGTCGCGCAAGACATGTCACATATTTGTTTCT |
| | | | | CCGAGTCTCAGACAACTGCTTTTTCAAAATGAAAGCATT |
| | | | | CTAGAACTATTTTGCTTACAGTTGATTTTCTAATTCTGG |
| | | | | GTGTACATAAATCAAGATAATTACTTTTATAAAACACAT |
| | | | | TCAAAAAGCCTCCTAGATGCCCCTATTATGAATTTTCTG |
| | | | | TTTGCTATACGAGTATCTGCTTTGTTTTTGAAAATGGTT |
| | | | | TTTTTGTTTTTTGCCAGTTGCTAGCTGGAGAGTTAAAGA |
| | | | | AACCGAAAGGATGATTGCCATTTGCACAGAACTTAGAAA |
| | | | | GGTAAAATGATACTTTGTTACTCTGTGATCTATGATACT |
| | | | | GCTATTGCTTAGAGGTCACTAAAGTGGTAAGGTCAAATA |
| | | | | GGATGGGTTTGAATGGGAACACTTTTCGCCCAAAACATA |
| | | | | TTTAACTAATATAATTTCACTTGTTACTATCTAATTTCA |
| | | | | TAAATGAAATGATTTAGAATTAGAATGTTTTGGGTGTCT |
| | | | | TGCAACCTATTCATTTTAAGCTATTTTAATTGTCTTTTG |
| | | | | ACCCATTAGAAATATACATAAGAAATATACTTAATCAGT |
| | | | | CCTCTATTGTTAATGTTTATCTGGGGTGAAATTTCTTCA |
| | | | | GTTGGGAGCAACAGTTGAAGAAGGTCCGGACTATTGTGT |
| | | | | GATCACTCCGCCAGAGAAGTTAAACGTGACAGCAATAGA |
| | | | | CACATATGATGATCACAGGATGGCCATGGCTTTCTCTCT |
| | | | | TGCCGCTTGTGCAGATGTTCCTGTGACCATTAAGGATCC |
| | | | | TTCTTGCACACGTAAGACGTTTCCTGATTACTTTGAAGT |
| | | | | TCTTCAAAGATTTGCCAAGCATTAATGTGATTATGGGTA |
| | | | | GTGGTTTGCTTTTCTATATGTAATTTTTGTTTCATTTGT |
| | | | | AACGAGTAAAATGTGAGTTTTGGGCATAACATATTCTTA |
| | | | | TGAACTTGTATTCTTTCGTAAGATTTTTTTAGTGTAATA |
| | | | | AAATATA |
| 69 | Euphorbia | cDNAContig | 1563 | ATGGCACAAGTTAGCAAATTCTGCAATGGAGTTCAAAAA |
| | heterophylla | | | ACCTCCATTTTCCCCAATTTTCCTAAACCGGAAACCCCC |
| | | | | AAATCGGTGCCTTCGTTTTCAATTAGGTCAAGTTTTAAC |
| | | | | GGGTCTCCGATTTCATCGGGTCTAAATCGGCGCCGAACA |
| | | | | AAGGGCGATTGTATTGTTGTTAAAGGTAAAGCTAGTTCG |
| | | | | TTTAAAGTTTCAGCTTCAGTAGCCACAACAGAGAAACCC |
| | | | | TCTACTTCACCGGAGATCGTGCTGCAACCAATTAAAGAA |
| | | | | ATCTCCGGCACTGTCACTTTGCCGGGTTCTAAGTCGCTG |
| | | | | TCCAATCGGATTCTTCTCCTCGCTGCTTTATCTGAGGGC |
| | | | | ACAACTGTTGTGGACAACTTGCTAAACAGCGATGATGTT |
| | | | | CATTACATGCTTGGCGCACTTAAAACATTAGGATTACGA |
| | | | | GTAGAAGACAATAGTGAACTCAAACAAGCTATTGTGGAA |
| | | | | GGTTGTGGCGGTCAATTCCCAGTGGGTAAAGAGTCAAAG |
| | | | | AAAGACATTCAACTTTTTCTCGGAAATGCAGGAACTGCA |
| | | | | ATGCGTCCTTTGACTGCTGCAGTTACTGCAGCCGGTGGA |
| | | | | AATTCTAGCTACATACTTGATGGAGTTCCAAGAATGAGG |
| | | | | GAGAGACCAATTGGAGATTTGGTAACCGGTTTGAAGCAG |
| | | | | CTTGGTGCTGATGTCACTTGCTCTTCCACAAATTGCCCC |
| | | | | CCGGTTCATGTCAATGCAAATGGCGGCCTACCTGGGGGA |
| | | | | AAAGTTAAGCTTTCAGGATCAATAAGTAGCCAATACTTG |
| | | | | ACTGCTTTGCTCATGGCAGCTCCTTTGGCTCTGGGAGAT |
| | | | | GTAGAAATCGAGATTATCGATAAACTGATTTCGATTCCT |
| | | | | TACGTTGAGATGACTTTAAAGCTAATGGAACGCTACGGT |
| | | | | GTTTCTGTACAACACAGTAATAGCTGGGATCGTTTCTTC |
| | | | | ATCCCAGGAGGTCAAAAGTACAAGTCGCCTGGAAATTCT |
| | | | | TATGTTGAAGGAGATGCCTCGAGTGCCAGCTACTTTCTA |
| | | | | GCCGGAGCAGCAATTACCGGTGGAACTATCACTGTTGAA |
| | | | | GGTTGTGGGACTAGCAGTTTGCAGGGAGATGTGAAATTC |
| | | | | GCCGAGGTTTTGGAGAAGATGGGAGCTAGAGTTACCTGG |
| | | | | ACGGAGAACAGTGTAACTGTGACTGGACCACCACGCGAT |
| | | | | TCTCCTCGTCAAAAACACTTGCGTGCTATCGATGTGAAT |
| | | | | ATGAACAAAATGCCAGATGTTGCTATGACATTAGCTGTG |
| | | | | GTTGCACTTTTCGCTGATGGTCCCACTGCCATCAGAGAT |
| | | | | GTGGCAAGTTGGAGAGTGAAAGAAACCGAAAGGATGATT |
| | | | | GCTGTTTGCACAGAACTCAGGAAGTTAGGAGCAACAGTA |
| | | | | GAGGAAGGAGCAGATTACTGTGTGATAACTCCGCCGGAA |
| | | | | AAACTAAATATAACGGAGATTGACACTTACGATGATCAC |
| | | | | CGAATGGCGATGGCCTTCTCTCTTGCTGCCTGTGGGGAT |
| | | | | GTTCCGGTCACTATTAAAGATCCCGGTTGTACTCGAAAA |
| | | | | ACTTTCCCTGACTACTTTCAAGTCCTCCAAAGCTTTACC |
| | | | | AAG |
| 70 | Euphorbia | Genomic | 9336 | ATTAATTACTTCAAAATAAGAAAACAACTGACTTCAGTA |
| | heterophylla | | | ATTATTTTTTCTTAACTTCTATTTTCGTTTTTAGATAGT |
| | | | | ATAGTCAAGCAACACAAATTAGTTCTTCGAGATAGTGTC |
| | | | | ATTGATTGATTTTGGGTCTAAACTTTAGTTCCTTCTAAA |
| | | | | GCCCAAGCCCAAGCTCAAGCTTGGTTATGGGAAATTTTA |
| | | | | CATCCAAGTTCACTTTTTATTTTTTTTTCCTACCTGGTT |
| | | | | CATCGGAGCTTTACTCCGACTACATCCAGATCTGACCCG |
| | | | | GGTCGCGCACCTGGCTATGATGGGTGAGTCTCCCAATAA |
| | | | | GGATTTTTTGCGTTCACCAGGACTCGAACTCGAGACCTT |
| | | | | GCTTAAGCAATACCAAGTCGCTTACCACTTGGACCAAAT |
| | | | | TCACTTTAACTCGAGATAAATAAAAAATTCACATTGACT |
| | | | | CATTAATACACTATTTTTTTTAACCAATTAGTCTTTAAG |
| | | | | CTTCTCCAGATTTATTAAATAATTAAAACAATAATCAAT |
| | | | | ATGAATGTTTTTTTTATCACGTGTAAAACATAATATAAA |
| | | | | ATGGACTTGGAAGACGTGTAGCCTATATCATTTTATAAA |
| | | | | AAAAATTATGTATACACTTATTAAGTTGTATGAATATTT |
| | | | | TTAAATAGTAAACACTTAGCAATTGATATCTCTAGTTAT |
| | | | | AAAGGTTGTCGATTTCCCACCTGATAACATGATTGACAA |
| | | | | AAATGTTTGGTCTAATGAACTTTGATACTATAATAAATT |
| | | | | GGTGAATATTAGGACTTTATTTTTTATAAGGTAATAGTT |
| | | | | ACTTTATTTTTCATTATTGTTGGATTAGTGATGTGGATT |
| | | | | TCAAAACAATGGTAGACTAGATGTAGTAAATTACAAACA |
| | | | | AAGTTATCATAAAATTTTTAATTGTATTTATTATATTTA |
| | | | | TATTATATAATCTCACAAAATATAATTATAAAAGTAGAT |
| | | | | ATGCTTATATATCTATAATAAGCACCAAACCTACCCACT |
| | | | | TTCCCTCCCTCACCAAACATGCCGTTAATGGACCAAAAT |
| | | | | GCTGATTTGGCAAAATCTAATTGGTAAGTTGCTAATCAC |
| | | | | ATAATAACAAAATTGACTCTATATCTTCAAAACCTTGGC |
| | | | | TATCTACCACGTCCCACTACCATACGCCACTTCTCAATC |
| | | | | TTACCAACCCCTTTTTCTTTTTGGCCCCATAATATTCTT |
| | | | | AACATTTCAATTTAGCCCACAAACTTTTAGAGCAAGTCA |
| | | | | AGTCATTTTTTTAAATTTCATTCGTCAAACTCCATTTTG |
| | | | | AGGAATTTCCATTACTTTCATTTTAACTATCATTCTCAT |
| | | | | TTTTCATATTAAATTATCAAAAAATAATAATATTTTATT |
| | | | | ATTATATTAATTTATGTAGATCATTTATGTTATGTTGTA |
| | | | | ATGAACTAATAAAATAATTAAAAACATTAAAATTCAAAC |
| | | | | AAAGTAATAAAATAATGATTCCTTGAAATAGAGAATGCC |
| | | | | CATATACGAGAAACCCTCGTTTTGAAGAATACCGTATGG |
| | | | | AGAATGGTTGGACTTAGGTCATTTTTATTTAGATTAATA |
| | | | | CTCAATGTAGTTCAATTTAGTAACCAATAAGAATTGGTA |
| | | | | CAAGTGGTAAGCGACTTAGTATCGCTTAGGCAAGGTCTC |
| | | | | GAGTTCGAGTCTTGGTGTACGCAAAAAAGTCCTTACTGG |
| | | | | GAGACTCACCCACCATAACTAGGTGCGCGACCCGGGTCG |
| | | | | GATCTGGATGTAGTTGGAGCAAAGCTCCGGTGAACCAGA |
| | | | | TGAAATTAAAAAAAAATGTAATCCAATTCAGTTTAAAAA |
| | | | | AACAAAACTTTTAGTTAATATTTGTTATTGTAATTGAAA |
| | | | | ATCAAATAATGTTGTGGGTCAAATTTGGAAAATTGTGAA |
| | | | | AGATGAGTTAGTTGGAAGAATGAAACACCTCAATTGTCG |
| | | | | TTACAATAACGCCTAAAACCTCACCAATCTCAAATCCAG |
| | | | | AGCAGCCATTTTTCTTCTTCCCCGTCGAGACCAGCAAGA |
| | | | | ATCAGAGATACACGGAGATTGGTGGAGGGGGATCCTGTA |
| | | | | GCTCTAGTTAAATGGCACAAGTTAGCAAATTCTGCAATG |
| | | | | GAGTTCAAAAAACCTCCATTTTCCCCAATTTTCCTAAAC |
| | | | | CGGAAACCCCCAAATCGGTGCCTTCGTTTTCAATTAGGT |
| | | | | CAAGTTTTAACGGGTCTCCGATTTCATCGGGTCTAAATC |
| | | | | GGCGCCGAACAAAGGGCGATTGTATTGTTGTTAAAGGTA |
| | | | | AAGCTAGTTCGTTTAAAGTTTCAGCTTCAGTAGCCACAA |
| | | | | CAGAGAAACCCTCTACTTCACCGGAGATCGTGCTGCAAC |
| | | | | CAATTAAAGAAATCTCCGGCACTGTCACTTTGCCGGGTT |
| | | | | CTAAGTCGCTGTCCAATCGGATTCTTCTCCTCGCTGCTT |
| | | | | TATCTGAGGTATGAATTGTTCTGGATTTTTCGGCGATTG |
| | | | | CATTCTGTGCCGTTGAATTGTAAGCTGCGGTTTTAGTAT |
| | | | | AATCATAATTAGATGAAGCAGAAAGGAACTTAGTTCTTT |
| | | | | TGCATTTTATGTTCAGATTCACATAGATCACTAACTGTT |
| | | | | GGGGAAATCAGGCAATGAAGGCTAGATAAATATGAAGTT |
| | | | | ATATCGAACACTTTGATTGAAACTTATTTAGCTTTCTAC |
| | | | | CAAATAATTTATTCGGATAAAATCAGAAATCGACAAGAA |
| | | | | CTTAGAACGAATGTTGTTGTGATGTTATGAAACAAAAAA |
| | | | | GTCTGTAAAACGTTATATTTGCCAATGCGTTCTCTCTCT |
| | | | | ATATATATAGAGAACCGAAATAACCGTCATATGTTAACT |
| | | | | GTTTTTGTAGTTATTTTCGTCTAAGTCGCGACATGGTCC |
| | | | | AAATCCAAAATTCACGAATTTTCCAAGGGAACTTTTGTT |
| | | | | GGAAATAAAATTTGCTTCCGAAACACCGAGCTGTCGGCC |
| | | | | TGGGGCGCTGCCCCAGGACCCCGCTAGGGGCTGCCGCCC |
| | | | | CTTAGGACTCCGCACTCGGGGGCGATGCCCCCGGACCCC |
| | | | | CTAAATCGTAAACAGTACCCGAACAAGTGTGCACTCCGC |
| | | | | ACTTTTCCAAACTTGTTTCGGTGAGACGTTACAATTACA |
| | | | | TTGGACAAACTTAGTTAATCCAATTACACTAAAATAATA |
| | | | | ACAACTTTTACTTTAGCTCGACCCCAGTTTGGGGCACTA |
| | | | | CCCCCAAAATCCGAATATTGAACTTGAACAAAGCATGCA |
| | | | | CTCCACACTCTCTTGACTTGTTCAATGAAATATCACAAT |
| | | | | CGCACAATTAGTTGATCTAATTACATTAAAATACTACTA |
| | | | | ACAACACTTAATCAACAGTCTATCATGTTGTTGGTTTTT |
| | | | | CTTTGAACTTCTGAAGCAGGATAGATAAAGATCGTTCCT |
| | | | | TCCCACTGATTGATACTATCATTGCATTGACCTTTAAAT |
| | | | | TATCTTCTTTTGGTGCATATAGATTACAGATTTAGTTAA |
| | | | | ATCACGTAAAGTTTGGGCTGAATTTTTGTTAAAATAAAC |
| | | | | TTCAAATTTGAAATCTTACTAATTTTTCAGTCCCTAGGT |
| | | | | TTCCATATCCCCTTTATTTCTAAAAGCCGTTGTTTTGTT |
| | | | | GGCATGCCTTATAATTGATTTTTCGTTTATTTCTTGCAA |
| | | | | TAAACAACTTTAAACTCTGGCCTTGGAAGCTTTTTTACC |
| | | | | TGTGTAAAGTAGTGATTCTGAGTGTTCTACATTCAAAAT |
| | | | | TTTGCTTCTCGAGACCATAAAACGGTGCTTTACATCTAT |
| | | | | TGTCCAGGGCACAACTGTTGTGGACAACTTGCTAAACAG |
| | | | | CGATGATGTTCATTACATGCTTGGCGCACTTAAAACATT |
| | | | | AGGATTACGAGTAGAAGACAATAGTGAACTCAAACAAGC |
| | | | | TATTGTGGAAGGTTGTGGCGGTCAATTCCCAGTGGGTAA |
| | | | | AGAGTCAAAGAAAGACATTCAACTTTTTCTCGGAAATGC |
| | | | | AGGAACTGCAATGCGTCCTTTGACTGCTGCAGTTACTGC |
| | | | | AGCCGGTGGAAATTCTAGGTTTACTTTTCCCCCTTTTTT |
| | | | | TACCCTCTTTAGACATGCCTTGATTTATTGAACAATAAG |
| | | | | CACTTATTTTCCACGACTTATGAGATTCTATATGGTTTA |
| | | | | ACATGTATCTAATGTGCTTCAGCTACATACTTGATGGAG |
| | | | | TTCCAAGAATGAGGGAGAGACCAATTGGAGATTTGGTAA |
| | | | | CCGGTTTGAAGCAGCTTGGTGCTGATGTCACTTGCTCTT |
| | | | | CCACAAATTGCCCCCCGGTTCATGTCAATGCAAATGGCG |
| | | | | GCCTACCTGGGGGAAAAGTATGTATCGATTTGGCTATCT |
| | | | | GTTTGCTATTAATTTCCAGAACTTTTCGTGAAAAATGTA |
| | | | | ACTTTTCAGAAAAGCAATCCTAAATTGGCCCTATAGTCT |
| | | | | TATTAGTAACGGTATCACAATATGTTTCTTCTCTTTTGA |
| | | | | ATTGTACCTAATTTTCCGTGTCTTCACTTTAAAGGTTAA |
| | | | | GCTTTCAGGATCAATAAGTAGCCAATACTTGACTGCTTT |
| | | | | GCTCATGGCAGCTCCTTTGGCTCTGGGAGATGTAGAAAT |
| | | | | CGAGATTATCGATAAACTGATTTCGATTCCTTACGTTGA |
| | | | | GATGACTTTAAAGCTAATGGAACGCTACGGTGTTTCTGT |
| | | | | ACAACACAGTAATAGCTGGGATCGTTTCTTCATCCCAGG |
| | | | | AGGTCAAAAGTACAAGTAAGTATTTTTTCTAGATTCACA |
| | | | | AATTCAGAAAGCTATTGAAAAAACGAAAGCTGAATTATC |
| | | | | GATCGATTAGGTCGCCTGGAAATTCTTATGTTGAAGGAG |
| | | | | ATGCCTCGAGTGCCAGCTACTTTCTAGCCGGAGCAGCAA |
| | | | | TTACCGGTGGAACTATCACTGTTGAAGGTTGTGGGACTA |
| | | | | GCAGTTTGCAGGTAAATCACGGAACTTTTTCGTATTAGA |
| | | | | CATTTACATTTTCACATCTGATGTAAATTAATATGAAAA |
| | | | | TCTAGGGAGATGTGAAATTCGCCGAGGTTTTGGAGAAGA |
| | | | | TGGGAGCTAGAGTTACCTGGACGGAGAACAGTGTAACTG |
| | | | | TGACTGGACCACCACGCGATTCTCCTCGTCAAAAACACT |
| | | | | TGCGTGCTATCGATGTGAATATGAACAAAATGCCAGATG |
| | | | | TTGCTATGACATTAGCTGTGGTTGCACTTTTCGCTGATG |
| | | | | GTCCCACTGCCATCAGAGATGGTAATTTACGTTTCTTTT |
| | | | | CATGAATTATGCTTCGTATTCTTCAAATAATTCGAAAAG |
| | | | | GCAGCCTAACATTTCCATGGATAATGCCGAACTGAATTA |
| | | | | CCGAATTTTCGTAAAAAAATTTACCGAACTGAACTGAAT |
| | | | | TTCATCTAATAATCAAAATTTTCTTACCAAAAATATTTC |
| | | | | GGTTATCCGAACAAAACTAAATTAATTAAAAAATGCAAT |
| | | | | TGGGTTTTTAATAAAATGGTTTATAAATGCAATAAAAAA |
| | | | | ATATTAATCCATCATGTTGCGAACCAAACATATTAGTTA |
| | | | | TCTTATAATAATTCAACCATACATATAAAACAAATCAGA |
| | | | | ATACTATTTTAAGAAACCGAATTATCCGAACCAAACTAT |
| | | | | GAATTATCCGAACTAAAATCCGAAATATACGAACCGAAT |
| | | | | TACATAATTCAGTTCGGAAATTCGGATAAACCCGAATTA |
| | | | | TGCACTGCTTTAAATTTAACAATGATTTGGCTGTAAAAT |
| | | | | CTAATGACTCAAATGTTACTCGGATCCTAAAATACGAAT |
| | | | | TCCCTTTTTTTCCTCTCGATCTTTTACAAGTGATACAGA |
| | | | | CATACAAGGGAAAGACGGATCATTTCCTTAGATTTCGTA |
| | | | | TGTTTAAAACTTTTAGACTATTTTTGTTTCTGTTTGACA |
| | | | | ATTTGTTCGCTACTCTTTATTTCCAGTGGCAAGTTGGAG |
| | | | | AGTGAAAGAAACCGAAAGGATGATTGCTGTTTGCACAGA |
| | | | | ACTTAGGAAGGTTAGTTTCTGATAAATAAATTTCACTGG |
| | | | | GTTTGAATATAGTGAAACAAAATTCGTCGGCTTATCGAT |
| | | | | TCTAATTATAATATTATTGATTGTTGGAATTTCAGTTAG |
| | | | | GAGCAACAGTTGAAGAAGGGGAAGATTACTGTGTGATAA |
| | | | | CTCCACCCGAGAAACTAAATATAACCGAGATTGACACCT |
| | | | | ATGATGATCACAGAATGGCCATGGCTTTCTCTCTTGCTG |
| | | | | CCTGTGGAGAAGTTCCGGTCACTATTAAGGATCCTGGAT |
| | | | | GCACCCGAAAAACTTTCCCGGACTATTTTGAAGTTCTCC |
| | | | | ATAGGTATACTAAGCAATGAACAAAAAACCCGAAAAACT |
| | | | | TGACAATTGATACTAAAGAGAGAATTGTTGCTGTAACCA |
| | | | | TTGAATTCTGATAATTTATTCAAGTGAGTTGAAATTTGT |
| | | | | TGATGTACCAGACTAGCTTTTTTTCTATCTCAAATGTTG |
| | | | | GGTGTTATTGTAGACAATGTATTCTGAATGAATTCGTTT |
| | | | | CGTAATCTTCGAGTTAATAAGCAATGAAAGGATGAATGT |
| | | | | TCTATTTAAGCACTGTTTTTTTGGCTACGACTCAATGGA |
| | | | | GTTCATTTCAGTTCAACTATGTGTACACCAAAATATGTT |
| | | | | CTATTCAGTTCAATTCAGAAAATTGCAATAAAAAAGAAC |
| | | | | ATTGCCTTAATTAATACGGAATATAGGCAAAACCCACAT |
| | | | | TGAGCCCCTTGCCAACTAAACTTTCAAATGTTCTTTAGC |
| | | | | TCCCAACTCGGCACTATTGACCTTCGAGGTCCCTCAAGT |
| | | | | TGTGGCACAAATGAATCTCCGAGCTCCCTCAAGCTTAAA |
| | | | | ATTAGGTATGTAAGCTTGAGGGAGTTAGGTAGTTTTAAG |
| | | | | CTTGACGAAATTTGAAGGGTCATTTGTATCAAATTGAGG |
| | | | | GAGCTCGGAAGGTCATTTGTGCCAACTTGAGGGGATTGA |
| | | | | GAGGGTCAATTGTGTCAAGTTTAGGGGGTTAGGAGTTTC |
| | | | | ATCCGAAAGTTTGGGCACCTTGAGAGTTATTTTTTATCA |
| | | | | TTAATATTTAGTATATTAATTTTAATTGACCATGTAATT |
| | | | | GCTAAAATCTATATTTTTCGCCCACGACCTCGTAATTTA |
| | | | | TAAGGCCAGCCCAGGGTAAGGTGTAAAAGAGTTAATCTA |
| | | | | AAAATAGAATCACATTCTTCGAAACCCAATCTCAATCTA |
| | | | | ACATTAAATAATGAAGCATGTAACATGTTGCCTTTGTCT |
| | | | | ATATGACATAACATTATTGAGGCATATCGCCCTCCTCCT |
| | | | | ATTTATTTTTCTTACACTTTCTCACATGGATGCCTACCT |
| | | | | TTGGTTGTTGGATGTGTCTTTTATATATTTCCTTCATAA |
| | | | | TTTACACATTACAATATTACATTACATATCAATCAATCT |
| | | | | CTTCTAATATAGTACTTTAAGTTGAGAATATTCTCAACT |
| | | | | AAATGTGAATAAAACAACAAATAATTGGGTTCTTTCCAT |
| | | | | GCTCACTTTGTTAAAAACAAAATTATGATTACTTTGCTT |
| | | | | CTTATCACCATTTGATCAATCACCCCACTACTTATTCAA |
| | | | | TAGTGATAAGGACAAAGTTATAGTTACTTAAAGTAACCA |
| | | | | TAGAATTTCCCCAAATAATTGTATCAATAGCGAGACTCA |
| | | | | ATAGATTAATGTTGTATATTATACAAGTAACCATTAAAC |
| | | | | TAGGTTTAGTGGTGACGACTTCCTCTAAAAGTGGAGAAA |
| | | | | GAAGCTGGGATCCTGAATTCGAGCCTCATATTTCTCAAA |
| | | | | ATTTAAATGTTTCTACTACTTAAAAAAATATTATTACAA |
| | | | | GCTATATTAGTTGAGTACTCTAATTTGCTATACATAAGG |
| | | | | TCTAAAAATATTAGATCTAACATTAATGTCGTATGCTTG |
| | | | | AAGTATCAACACTCACTTTATACATTATTCAATCACTTG |
| | | | | CTGATTATTGAAGATAGAGAAGACACTATAAGCTATTAT |
| | | | | AAGGAAGAAAAAGGAAAAGGGAAAAGCAAATAATAAAAG |
| | | | | GACCAATCAAAGACCTAGAAAAAGCTAAAAATAGTGCCA |
| | | | | AAACATTGTAGTATAGATGCAAATAAAAATAATTTTACT |
| | | | | GTTCTATCTTCTGTTCTAAGTAAAGAAGTAAGCTATTTA |
| | | | | TATTTATTAATTGTTTAATTTCACTTTCAGGATATCTTG |
| | | | | TAATTGAATTATTAAGAACATAGGCATTGAGTTTAAGCA |
| | | | | ATCAATTATATAATTAATGAACAATAATTCTTTTTAAGT |
| | | | | GTGATAAGTGGCTTATTTAGTGTAGATAAATGGACAGCA |
| | | | | AATCCTTTTCAAAGTCACTTGCTTATGTATGAAAATCTT |
| | | | | ATATTGTACACTATATAATGAAACCTACCACTAAAGAAG |
| | | | | TGACACACACATATTTTAACCTTTATATATTTTTCTATG |
| | | | | ATAATTCAATTATAATTCCGACTTTCATAAATATGAAAA |
| | | | | ATGGTAGTAGTAATGACAAATTGTCTTAACTTAAATGAT |
| | | | | CGGAAGCTAAAATTCTAATTAAGGAAAGTTGAAAACCTT |
| | | | | AAATCAAGAATCTTGGAAAGCAAAAAGTAAAATAAAAGT |
| | | | | CCAATAATAACCCAATCCCAAAATATATCTCACACACTT |
| | | | | CCAAGGTGTGAAAATAACTAATGGTCCCAATACTAAAAT |
| | | | | TAAGTTAGATTTTCACTATATAAAGTATGTAATCCTCAA |
| | | | | AGTAAGGATTTGATTGGCCAAAATTCATGGTCTCTCATA |
| | | | | CCAATCTAATCAAATTTAAAGACATTTTTGACATTTAAT |
| | | | | CAATCATATTGCAAAAAAAAAAAAAAAACTAAACCAATA |
| | | | | CACCTCCCATTATTGCAAGTGTTTTTTTAAAAAAAGGTG |
| | | | | GCATTTTTCCCTCTTCCTAATACTATTAATGCCTTTTGT |
| | | | | TTATCAATTTAGTGTTACTCCTAAATTAAGTAGTTAACC |
| | | | | TAATTAATTACCCACAATTTCCTATTCCTATCTTTCATA |
| | | | | GCCCCTTCTCCACATCATTTGCTAAACAAAAGAAAAAAA |
| | | | | AAACCTGTCAGCTTTTATATTTTTATATGAACTAGTGTA |
| | | | | GTGCCCGTGCGATGCACGGATAAATTTTAAAAAATATAT |
| | | | | TATATTGCAACATAAAACAAAAATATGTTATATCGTGTA |
| | | | | TTGAATTAAATTGTGAAAAACCTTTTTATATACAACATT |
| | | | | TGCAGATTCATCTATTAATTGTTCATTATCGTTAAGAGA |
| | | | | AAAGGGCATGATATCATATAAATCCGTCTTCAATTACAC |
| | | | | CATAAGTGGGTTGATATCATTAATCATATTATTTTTTCA |
| | | | | CTTCAAAATATGAAAGATATAAATTTCTACAATTACCAT |
| | | | | ATGCTTTCCCATCAAAATTTGATGAGGGGAAAAGAGACA |
| | | | | ATTATTCTTAAATAAGAAGGAATAATTATTGCTAAAAAT |
| | | | | TTTAAAAATTTAATCTTAAATAGAATTGTAACCAACATA |
| | | | | ATTAAATAAAATAAGAATAACAAATTAAATTTTATAATA |
| | | | | GATTTTAGAATTATAATGAGATTTTGATTTGTTTCCATG |
| | | | | ATTCACCCTAATTAATTATTTTCCCATAAAAATAATTAT |
| | | | | TGATATTAATCATTATCATTTTTCTAAATAAATCTATTT |
| | | | | TAGAAATATATTAAAATCAATTTCCTAAAATTCATGAAA |
| | | | | AATACCAATTTCTTTATTACTATAAACGACAATTATTAT |
| | | | | TATTGTTGTTATTAT |
| 71 | Euphorbia | Genomic | 6002 | ATTTTCCCCAATTTTCCTAAACCCGAAACCCCCAAATCC |
| | heterophylla | | | GTTCCTTCGTTTTCAATCAGGTCAAGTTTTAACGGGTCG |
| | | | | CCGGTGTCATTCGGTCTAAATCGGCGCCGGACAAAGGGC |
| | | | | GACAGTATTGTAATCAAAGGTAAAGCTAGTTCGTTTAAA |
| | | | | GTTTCAGCTTCAGTAGCCACAGCAGAGAAACCCTCTACT |
| | | | | TCACCGGAGATAGTGTTGCAACCAATTAAAGAAATCTCC |
| | | | | GGCACCGTCACTTTGCCGGGTTCCAAGTCGCTGTCCAAT |
| | | | | CGGATTCTTCTCCTTGCTGCTTTATCCGAGGTATGAATT |
| | | | | GTTCAGAAATTTTCGGCTATTGCATTCTGTGCCGTTTAA |
| | | | | TTGTAAGCTGAGCTTTCGTTATTGTCATGATTGCATTGA |
| | | | | CCTTTTGATTTTCTTCTATAGCTGGTTATAGATATCAGA |
| | | | | TTTAGCTTAATTATGTAAAGTTTATGCTAATTTTTTTTG |
| | | | | AATTAAACTTCAAATTTTGAGCTATAACTTATCTTTTAG |
| | | | | TTCATGTGTTTCCCTTGTTCCCTATCTGAAGACTTTTTT |
| | | | | TTTGCAACGATAACTTCATAATATGGCCTCCATAGCTCT |
| | | | | GTAAAGTAGTGATTTTGAGCGTTTTTTGCTTGAATATTT |
| | | | | TGCTTCTCGTAGAATGTTGACTAATAGAACGGTGCGTAA |
| | | | | AATGGTTTTTACATCTATTGTTCAGGGCACAACTGTTGT |
| | | | | GGACAACTTACTAAACAGCGATGATGTTCATTACATGCT |
| | | | | TGGTGCACTTAAAACACTCGGACTACGAGTGGAACACAA |
| | | | | TAGTGAACTCAAACAAGCTATTGTAGAAGGTTGTGGAGG |
| | | | | TCAATTCCCAGTGGGTAAAGAGTCAAAGAAAGATGTCGA |
| | | | | ACTTTTTCTCGGAAATGCAGGAACTGCAATGCGTCCATT |
| | | | | GACAGCTGCAGTTACTGCAGCCGGTGGAAATTCTAGGTC |
| | | | | TTTTTTTACTCCCTTTCTTACCCTCTTTATATAACCCTT |
| | | | | GCTTTACAAAACAATCACACTTCTTTTCCACGACTTATG |
| | | | | AGGTTCTATATGGTTTAACATGTATCTAATGTGCTTCAG |
| | | | | CTACATACTTGATGGGGTTCCAAGAATGAGGGAGAGACC |
| | | | | AATCGGGGATTTGGTAACCGGTTTGAAGCAGCTTGGTGC |
| | | | | TGATGTCACTTGCTCTTCCACAAATTGCCCACCTGTTCA |
| | | | | TGTCAATGCAAATGGCGGCCTACCCGGGGGAAAGGTATG |
| | | | | GTACTGTTGTCACGAAAAGTTCCACTTGCAAACTTTTAT |
| | | | | AAGAACAAAATATTTTGACATTAGAGAAATGATTTTGAC |
| | | | | TATCTGTCTGCTATTAATTTCCGGGTAAATAATTATAAC |
| | | | | CTCCCTCAAGTTTGACATAATACGCTACTACCTCATTGG |
| | | | | GTTTTAAAAACCTAATATATACCTCCCTATGTTTTATAT |
| | | | | TTTCTAATTACTATCTCCCTATACTTTACTTTTATTATA |
| | | | | TTGTTAGGCCCCTTTATAGGTTATTATGTCATTATTATA |
| | | | | TGGAAAATTAACCAAAATATACATTTATAACAAAACTAT |
| | | | | TATTGTTGTGATATTTCTATATTCAATTTTTCTTTGATT |
| | | | | TTTCTATTTTATGTATGTTTTTTCTAACACAATCATAAG |
| | | | | ACTGGAATGTAATAAGATGTTAGAAAATAAGCAAAACAA |
| | | | | ACATCTTATTTGTGAAATATCTTCAAAAATCAATACATA |
| | | | | TGATCACTAGTTAAGAAAATATTGTAAAAAAGTGTATGG |
| | | | | AACATCAATGATTTTGTGTGAAAATGCTTAACGATTGAT |
| | | | | AGAGTGAGGTAGAAATAAGAAAATGCAAAACATACGGAG |
| | | | | GTATAAATTATGTTTTTAAAACACAGGGAGGTGTTAGTA |
| | | | | TATTATGTCAAAACTGAGGGAAGTTGTAATTATTTATCC |
| | | | | TTAATTTCCGGAACTTTTCGGGACAGTAGCTTGGAAAAG |
| | | | | CACGAAAATGTAACTTTTCGGAAAAACAATCCCAAACTG |
| | | | | GCCCACTTATTCAGTAATGTATCACAATATATTTCTTCT |
| | | | | TTTTTGAATTCTACCCTAAATTTCCGTGTCTTCACTTTT |
| | | | | AGGTTAAGCTTTCGGGATCTATTAGTAGCCAATACTTGA |
| | | | | CTGCTTTGCTGATGGCTGCTCCTCTGTCTCTTGGAGACG |
| | | | | TAGAAATCGAGATTATCGATAAACTGATTTCAATTCCTT |
| | | | | ACGTTGAGATGACTTTAAAGCTAATGGAACGCTACGGTG |
| | | | | TTTCTGTACAACACAGTAGTAGCTGGGATCGTTTCTTCA |
| | | | | TTCCAGGAGGTCAAAAGTACAAGTACGTATTTTTTGGGT |
| | | | | TCAACTTCCAAAACTCCCTTGTGGTTTCCTCATTTTCAA |
| | | | | AAAGGCCCTTAGTGTAATTTTTTTTTCAAAAGGGCCCTT |
| | | | | GTGGTATAAAAAATTAGCAAAAAAAGAGGAGTCTCTCTC |
| | | | | AACAAAGATAGTTGTTTTGACTTGGCAAAGGGTATTTTC |
| | | | | ATCAAACCCCAAATTTTTCAAAATTTAAATAAAAAAATT |
| | | | | ATTATATTTCAGATTGTCAACTCAAGGTAACTAACTTTG |
| | | | | ATGTGAAAAATAATCCCCTTTTTGCTTATTCTTGATACC |
| | | | | ACAAGGACTCTTCTGAAAAAAAGTTACACAAGGGCCTTT |
| | | | | TTGTACACGAGTAAAACCACAGGGGGGTTCTTGAAGTTA |
| | | | | ACCCTATTTTTTGGATTAGTAAATTCAGAAAGTTTGATT |
| | | | | ATGCTGAAGAAACGACAACCTGAAATATCGATCAACTAG |
| | | | | GTCTCCCGGAAATTCTTATGTTGAAGGAGATGCCTCAAG |
| | | | | TGCCAGCTACTTTCTAGCCGGAGCAGCAATTACCGGTGG |
| | | | | AACTATCACTGTTGAAGGTTGTGGGACTAGCAGTTTGCA |
| | | | | GGTAAATCACGGAACTTTTTCGTATTAGACATTTACATT |
| | | | | TTCACATGTGATGTAAATTACGTGTTATATGAAAATCTA |
| | | | | GGGAGATGTGAAGTTTGCCGAGGTTTTGGAGAAGATGGG |
| | | | | AGCTAAAGTTACCTGGACGGAGAACAGTGTAACTGTGAC |
| | | | | TGGACCACCACGGAATTCTCCTCATCAAAAACACTTGCG |
| | | | | TGCTATTGATGTGAACATGAACAAAATGCCAGATGTTGC |
| | | | | TATGACATTGGCTGTGGTTGCACTTTTTGCTGATGGCCC |
| | | | | GACCGCCATCAGAGACGGTAATTTCCTTTTATTTTCATG |
| | | | | AAGGGTAAACTTCAAAAAAGAACCTTTTGGTTTCGCTCA |
| | | | | TTTTCAAAACGGGGTCTAAGAATTTTTTTTGTAAAATTG |
| | | | | GGTTTGTAGTTTCAAAAATTTAGCAAAAATGGGCCTTTG |
| | | | | GCTTCGAAATAGTGGTGTTACATTGAATATTTATAAAAA |
| | | | | ATTTAACATTCTAATAATTTAACCTTATCATTTAAAAAT |
| | | | | TAAATGCTAGAGTTTGAATAATTTTCGGAGATTTTTTTA |
| | | | | AGTTTATTATCATAATTTGTTTAAAAAATATATTTGCAC |
| | | | | TTGTCAAAATTTTTTACCGATGTGTATTATATTTTGAAT |
| | | | | AATCATTCCGAAAAAATTCAGATAAAAACAAACAAAGAT |
| | | | | TAACAATTTCCGTGACATGTTTTAATATTGAGTAGCCTT |
| | | | | TATTTGCGAATTTTCTGAAACCACGTACCCCGTTTTGAA |
| | | | | AAAAAAAAAATTCCTCAGACCCCATTTTGTAAATGAGTG |
| | | | | AAATCACAAGGTACTTTTTTGAAGTTTACCCTTTCATGA |
| | | | | ATTATGCTTCGTATTCTTCAAATAATTCGAAAAGGCGGC |
| | | | | CTAACATTTCCATGGACCTGAACTCCATATATAATACCG |
| | | | | AGCAATTTTAACAATGATTCGATTGTAAAACCTATTGAC |
| | | | | TCAAATGTAATTCGGATCCTAAATACGAATTCCCTTTTT |
| | | | | CTCTCTCTCGATCTTTCCAGTGGCAAGTTGGAGAGTGAA |
| | | | | AGAAACCGAAAGGATGATTGCTGTGTGCACGGAACTCAG |
| | | | | GAAGGTTAGTTTCTTATAAATAAATTTCACTGGATTTGT |
| | | | | ATACAGTAAAACGAAAATTTGTCGGCTTATCGACTCTAA |
| | | | | TTATAATATTATCAATTGTTGGAATTTCAGTTAGGAGCA |
| | | | | ACAGTTGAAGAAGGGGAAGATTACTGTGTGATAACTCCA |
| | | | | CCCGAGAAACTAAAAATAGCTGAGATTGACACTTATGAC |
| | | | | GATCACAGAATGGCCATGGCTTTCTCTCTTGCTGCCTGT |
| | | | | GGAGAAGTTCCGGTCACTATCAAGGATCCTGGATGCACT |
| | | | | CGAAAAACTTTCCCGGACTACTTTGAAGTTCTCCATAGG |
| | | | | TATACTAAGCAATGAACAAAAAACCCGAAAAACTTGACA |
| | | | | ATTGATACTAAAGAGAGAATTGTTGCTGCAATCAATGCA |
| | | | | ATTCTGATGATTTATTCAAGTAAGTTGATATTTGTTAAT |
| | | | | GTACTGGACTAGCCTTTTTTCTTACCTCAAATGTTGGCT |
| | | | | GTTATTGTAGACAATGTATTTTGGGTTGAATCCATATTG |
| | | | | TAATCTATCGAGTTAATAAGCAATGAAAGGATGAATGTT |
| | | | | CTATTTAAGCCCTGTACTTTTGGACTACAACTCAATGAA |
| | | | | GTTCAGTTCAGTTTAGCTACGTGTAGTTATAAATTTACT |
| | | | | CTAAAATACGTTCTATTCAGTTTAATTCAGAAAATTGTA |
| | | | | GTAATTAATACAAAATATAGGCAAAACCCATATTGAGCC |
| | | | | CCTTGCCACCTAAACTTTCAGATGTCCCTTTAAGCTCCC |
| | | | | CCAACTTGGTACATTTGACCTCCGAGCTCCCTCAAGCTT |
| | | | | AAAATTAGGCATGAAAGCTTGAGGGATAAAGCTTGAGGG |
| | | | | AGCTCGCGTAGTTTTAAGCTCGAAGGAGCTTGAAGGGTC |
| | | | | ATTTGTGTCAAACTAGGGGAGTTCGAAAGGTCATTTGTG |
| | | | | CCAACTTGAGGGAGCAGAGAGGGTCAATTGTGTCAAGTT |
| | | | | TAGAGGGTTAGGAGGTTCATCCGAAAGTTTGGGCACCCA |
| | | | | AGAGGAAAAAATTGCCAAATTTAGGAGGCTCAATATGGA |
| | | | | TTTCGCCTAGAATATACTTAAATATAGATGCATGACTCT |
| | | | | TATGGTCTATTAATAAATACTATAGTTACAAGTACCGCT |
| | | | | TCCTCTTAGGAGAAAACTAATGCATTTTTAAAAGGTTAT |
| | | | | GGGCTTGCAAGTATCTTTTCAAAGTTTTAAGGGCAATAA |
| | | | | GCGAATGAGATAAGTTGAGGGAGCTAGTTCCATGTAGGG |
| | | | | AAACCCTGCCTGTTGAAAATCGTTTGTAAGCCATATGAT |
| | | | | AGTACGGTGAAAACAAAATTTTAGCGAAACTCATGTGGA |
| | | | | TGGCAAGCAAAGGAAAGGAGAATGACTAAAGGAGGTAAG |
| | | | | GTGTAAAAGAGTAAATCTAAAAATAGAATCACATTCTTT |
| | | | | AAAAGCCAATCTCAATCTAACATTAAATAATGAAGCATG |
| | | | | TAACATGTTGCCTTTGTCCATATGACATAACATTATTAA |
| | | | | GGCATGTCGCCCTCCTCCTATTTATTTTTCTTACACTTT |
| | | | | CTCACATGGATGCCTACCTTGGTTGTTGGATATGTCTTT |
| | | | | TATTTATTTATTTCCTTCTTAATTTACACATTTCACTAT |
| | | | | TAAACATCAATCGATCTCTTCTAATATAGTACTTTAAGT |
| | | | | TAAGAATATTCTCAATTAAATGTGGAATGAAACAAAAAA |
| | | | | TAATTGTATCAATAGCAAGAATAAATAATTATACTTAAA |
| | | | | AAACATGTCCCACAAAATTAGATTCAATAGATGTGAAGT |
| | | | | CAATATTTTACAAGCAACCACTAAATTAGGTTCAGTGGT |
| | | | | CACAACTTCTTTTAAAAGTGGAGAAAGAAGTTGGGGTCC |
| | | | | TGAGTTCGAGCCCCATATTCCTCAAAATTTAAATGTTCT |
| | | | | TATTACCTAAAAATATATTATTACAAGCTATATTTGTTG |
| | | | | AAATCTCTAATTTGCTATACATAAGGTCTAAAAATATTA |
| | | | | GATCTAACATTAATGTCGTATGCTTGAACAACATCCACT |
| | | | | TTATACATTATTCGATCACTTGCTGATTATTGAAAATAC |
| | | | | AAAAGCACTAAAAGCTACTTCCTCCATCTAGATTTAATG |
| | | | | GTTTTTTTAGACCTTTTTTCACATCTTTTTTAGTTGTCA |
| | | | | ATTCCTATTTACCATGTACTTTTCCAGTCATGCCCCTAT |
| | | | | TAATTGCAATTTTGAAAAGCTTTGAGAATGAAATA |
| 72 | Euphorbia | Genomic | 5555 | ATTCGTGCTGCCATTAAGGAGGCTAAGGCTGTAAAAGAC |
| | heterophylla | | | AAGCCCACTATGATCAAGGTGAAATGATGCCTCTCTTAC |
| | | | | AGTGTGTTTATATATAGATATAAACAATAGAAGTTTTTA |
| | | | | AATGGTGTTTGTACTTGCTTGCAGGTCACTACAACAATT |
| | | | | GGTTATGGATCGCCAAACAAGGCAAACTCATACAGTGTA |
| | | | | CATGGAAGTGCACTTGGTGCCAAGGAAGTTGATGCTACG |
| | | | | AGGGCGAACCTAGGATGGCCCTATGAGCCTTTCCATGTT |
| | | | | CCAGAGGATGTTAAGAAGTAAGCCGACACTACTAGCTAG |
| | | | | GTTTCCGTCTGTTTTTTTTACCGATTTTGATTTGACTTT |
| | | | | GATGACTCTTGTTTCAGGCACTGGAGTCGCCATGCTGCA |
| | | | | GAGGGAGCTTCTTATGAAGCTGAATGGAACGCTAAGTTT |
| | | | | GCCGAGTACGAGAAGAAATACAAGGAGGAAGCTGCAGAG |
| | | | | TTCAAGTCCATCATCACGGGTGAATTACCGGCTGGCTGG |
| | | | | GAGAAAGCACTTCCAGTGAGTATCTGCTTCATATTTCTT |
| | | | | GCCCCTTTTATCTTTTAGGTGGCGTTTGGGTCTCGGAAT |
| | | | | TCCTATTCCGTGGAATAGAAATAGAAGTGTGTGGAAAGA |
| | | | | TGTCAAATATAGAAGAGAATTCTAGACGCATGGAAAAGC |
| | | | | TTTTCCAAGTTTGTATACATCTCATGGAAAAGCTATTCC |
| | | | | TTTGTTTCAAAAAGGAGTAGCTTTTCCTTGAGATGTATA |
| | | | | TAAACTAGGAAAAGCTTTTCCATGCGTCAATGGATTCTA |
| | | | | GATGATTAATGTGTCATATTTGACATCTTTCCATGCATT |
| | | | | TTTACTTCTATTCCATGGAATAGGATTTCTGCTAACCAA |
| | | | | ACGAGCCCTTAGAGTTATTACTTAGTGAATTTCCACTTG |
| | | | | CATTATCTGAAAACAGACATCTCATATTTTCTTTGTCAA |
| | | | | GCTTTATGAGCGTGTTTGGCATCAATGTTTGGCATGAAA |
| | | | | TTTAACTCAATTCAAATTATTTTATACCTAAGATTGTAA |
| | | | | ATATGAAATGAATTCTTTCAAAACAAGATTTCCAACACA |
| | | | | CCCCATGACTAATTTCTCCATATGTTTGACCTCATGCAT |
| | | | | AATTTGGAACCAATCACTTCAGACAACCCGATACACATT |
| | | | | CTTAAGAGTTAGGACAAAACGAACATTGGATTTTCAGAC |
| | | | | TTGATAATCTCTTAATCCTTCACTATTGAAATTTTTACA |
| | | | | GACATACACCCCAGAGACCCCAGCAGATGCCACCAGAAA |
| | | | | TCTATCACAAGCCAATCTAAACGCACTTGCCAAAGTGCT |
| | | | | CCCCGGTCTCATCGGTGGCAGTGCAGATCTTGCCTCATC |
| | | | | AAACATGACCTTGCTGAAAATGTTCGGCGACTTCCAAAA |
| | | | | AGACACTCCAGAAGAAAGAAACGTCCGGTTCGGTGTCAG |
| | | | | GGAGCATGCAATGGGCGCCATCTGCAATGGCATAGCTCT |
| | | | | CCATAGCCCCGGCTTTATCCCCTACTGTGCAACTTTCTT |
| | | | | CGTTTTCACCGACTACATGAGAGCCGCCATGAGGATCTC |
| | | | | CGCCTTGTGTGAGGCCGGCGTAATTTACGTCATGACCCA |
| | | | | CGACTCCATCGGTCTCGGAGAAGACGGGCCCACCCACCA |
| | | | | GCCGATCGAACACCTGGCAAGCTTCCGTGCGATGCCCAA |
| | | | | CATCTTGATGCTCCGACCGGCCGACGGAAACGAAACTGC |
| | | | | CGGTTCGTACAAGGTTGCTGTCCAAAACCGGAAGAGACC |
| | | | | CTCGGTCCTCGCACTTTCTCGACAAAAGCTGCCGAATCT |
| | | | | CGCGGGAACCTCGATTGAGGGGGTTGAAAAGGGCGGGTA |
| | | | | TACAATTTCAGATAATTCGACCGGGAATAAGCCTGATGT |
| | | | | GATTTTGATTGCGACCGGTTCGGAGTTGGAGATTGCGGC |
| | | | | TAAGGCCGGGGATGAGCTTAGGAAGGAGGGCAAGGCGGT |
| | | | | GAGGGTCGTGTCGTTTGTGTCGTGGGAGTTGTTTGAGGA |
| | | | | GCAGTCGGATGAGTACAAGGAAAGTGTTTTGCCGGCGGA |
| | | | | TGTGACTGCTAGGGTTAGCATTGAGGCTGGTTCGACATT |
| | | | | TGGGTGGCACAAGATTGTGGGAAGCAAAGGGAAGGCGAT |
| | | | | TGGGATTGACCACTTTGGAGCAAGTGCGCCGGCTGGGAA |
| | | | | AATATACAAGGAGTTCGGTATTACGGCTGAGGCGGTTGT |
| | | | | TGCTGCTGCCAAAGAAATTTCTTAGACTGAAGAGCGAGA |
| | | | | GTTTGGCGAAATGGGTACCCGAAGAGCGAGAGTTTTACC |
| | | | | ACGACTTGGTCTCTGTTAAAATAATAAGGTAAAAATATC |
| | | | | AAGGTTAGGTTTTTCTTGTGATGAAATGGGCAAGGCAGT |
| | | | | CCAGAAAAAGAGGAGGGTTTGATTATGAACATTGTGGGC |
| | | | | TTTGTAACTGCTCTTGACTTAAGTTGAGTTTTTGTGTTT |
| | | | | TTACTTGTAGCTAGTGAGGTTGACAGTTATTTCATACTG |
| | | | | CGTTTTAATTTATTGAGAAGCAATTGAGTCTCTTTTCTT |
| | | | | TTGTCTATTTGACATAAGTTATTTCTACTTCTAATATCT |
| | | | | GCTAACCACCTTGTTAGTAGCAGTAGGGTTGAGCATTTT |
| | | | | GTTATGCCGAGCCTATTAGGCTGCACTGAATTATCGAAT |
| | | | | ATTGATTGGAGCATTCGGTTATGAAAGTTCAGTATTATG |
| | | | | TGAAACTATTCAGTTCGGTACAACCGATCGCTCTACTCT |
| | | | | AAGTAGCAGACTGGTTTTCGGATATACTCGATAAAATTG |
| | | | | ATAATCTGATCTAAGCCTTTAAAGTTACTTCCGATTTTC |
| | | | | AATTTTTGAGAGCCGAATTGAAGTTTGCCGAATTTAATT |
| | | | | GGATTGAACTTAACTGAAGTATGCTAAATTAAACTACAT |
| | | | | AGAAGTGACTTGAACTTAGTTGAACTTACATTATTGAAT |
| | | | | TGAAATGAAGGAATGGAATGATCTGAATTGTAGTTAAAG |
| | | | | AGAAGTAAAATGTTGCATCAATTGGACCCACCGCATATA |
| | | | | GTAGGAAAAGGGTGAGCAAGTGGATGGAGATATGGTGAA |
| | | | | ATGTTAGCCTAAATGGGGATTTTTGGGGTGGGTGAGGTT |
| | | | | GTTGATCAATCAAGCCCCACCTATCCATGCATGTCCTCT |
| | | | | CGCTGGTTTTGAAGCTATAAATCATAATTGGCCTTCATT |
| | | | | TGATGATGCAAGGAATAACGAATTTTGGCATATTCTTAC |
| | | | | ACCTAACTCCACCATATTCAAAGTAGCTAATAAATTTCA |
| | | | | TGAAAAATAAATCCATGAAAAAGTGTGGTCAGAGACAAC |
| | | | | TTTTTAGGAATTCAATTCATTTTATATGTAAATTTTTAA |
| | | | | ATTTTTTATATAAAATAATTTCAAAAGAAATTAATCGAA |
| | | | | TTCTTTTGAAAAAGAATGATTTCAAGCACATGAGAATTA |
| | | | | TTTTATCCACAATATTGTATCAGTAAATTTTCTCTTAAA |
| | | | | TTGATAAAAAAAATAGTGTTAACTGCCATTCGGTTATAC |
| | | | | TTACAATTGTCTCTTTCAATTACTACTATGCACGTAATT |
| | | | | TAAAAACAAAAGTAGAACTTTATTTCTATGCCTTATTGC |
| | | | | CAAAATACTCAGGCCATAGGCTAGTCATTTTGCAGAAAC |
| | | | | GTTTGCACCAGTGCACAAACAATCGGGCAAAATGTATGG |
| | | | | CCAGTTAGTTGCCTCAGCATTTTGGCAAATCGGCAAGTT |
| | | | | GTATTTACATTTTTCAATAGAAACGTATAAAAAATTTTG |
| | | | | GAATTCGAAAAGATGTCCATTGGTTTCCTTAGATGCATT |
| | | | | TTTAAAGCTAATCTAGTTATTTCGAAGGTATATACTTCT |
| | | | | TCTTCTATATTTACAATTTCATATTATATAGTTTCTGTA |
| | | | | ATTATAGTGATATTAGAAGAAGGGCTAAAAGGCTTTACC |
| | | | | AACACAACCTTTTTGGTTTGGTCTTCATTCAAAAGCCCA |
| | | | | TTCCACAATCTTCATTTTATGTCCCCACAAAACCTACTT |
| | | | | CTCTCTCACCAAACCTACCTATTATAATGACCAAAATAC |
| | | | | TGATTTGGCAATACCTAATTGGTAAGTTGCAAATCATAA |
| | | | | CAATAAAATCGACTTCACACTATCAAAACCTTCGTTAAC |
| | | | | TACCACGTCCCACAGTGTTTGGTATAGACGCCACATTCT |
| | | | | CAGTCTCACCAACCCCCTTTCTTTTCAGTCCTTCAAATT |
| | | | | CACAACATTCCAATTTAGCCCACAAAATTTTATTTTCTG |
| | | | | TGCCTCCAATTCTATTATACACAATCCCCTAACTTAACT |
| | | | | TTTTATCACTAAAAATCAAATAAAGTTGATGGGTCAATT |
| | | | | TCGAAAATTGATGAAATATGAGGTTGGTAGGAAGATTGA |
| | | | | AATACCCTCAATTGATTTGAATACAACCAACTCCTAATT |
| | | | | ACAACTAAACCCTCACCAATCTCAAATCAACGCACCCAT |
| | | | | TTCTCTTCTTCCCCATTGAGAATTCAAGACCTCCATAGG |
| | | | | GATCAGAGAGTTGCAGAGAACTTGATAGCCCTACTTGAA |
| | | | | TGGCTCAAGTTAGCAAATTCTGCAATGGAGTTCAAAAGA |
| | | | | CCTACACTTTCCCCAATTTTTCTAAACCGGAAACCCCCA |
| | | | | AATCTATGCCTTCATTTTCAATCAGGTCAAGGCTTAATG |
| | | | | GGTCGCCGGTTTCATTGGCTGTAAATCGGAGAAGGGGCG |
| | | | | GCTGTATTGTTGCTAAAGGTAAAGGTAGTTCTTTTCAAG |
| | | | | TTTCGGCTTCAGTAGCCACAACAGAGAAACCCTCGACTG |
| | | | | CGCCGGAAATAGTTTTGCAGCCAATCAAAGAAATCTCCG |
| | | | | GCACCGTCACTTTGCCTGGTTCAAAATCGCTGTCCAATC |
| | | | | GGATTCTTCTACTTGCTGCTTTATCTGAGGTATGAATTG |
| | | | | CTCTGGTTTTTCCGGCAACAGCATTATGTGCCTTTGAAT |
| | | | | TGTAAGCTGAGGAGATTTCATTGTTGTCATCATTATAAT |
| | | | | TGGTGCTTCCTTCTTGTTTGTTAGAAACTTAGTTGAAAG |
| | | | | GCAAACGAAATTAGGATCACATAGATTACTAACTGTCAA |
| | | | | TAGTCTATTTAAATTGTTGTTATCGATCGTTCAGGGCAC |
| | | | | AACTGTTGTTGACAACTTGCTGAATAGTGACGATGTTCA |
| | | | | TTATATGCTGGGCGCACTTAAAACACTGGGACTACGAGT |
| | | | | GGAAGACAACAGTGAAATTAAACAAGCTATTGTGGAAGG |
| | | | | TTGTGGAGGTCAGTTCCCTGTGGGTAAAGAATCAAAGAA |
| | | | | GGACATTCAACTTTTTCTCGGAAATGCCGGGACAGCAAT |
| | | | | GCGCCCTTTGACTGCTGCAGTTACTGCAGCCGGTGGAAA |
| | | | | TTCAAGGTCTTTTACCTTCCCCCTTTTTACCCTTGCAGA |
| | | | | ATTATTGGACTTGTATTTTTGAGACTCTATATGGTTTTA |
| | | | | ATCAGAGTATGTGGTTTAGGATTTATAAGCTTGTCTTAT |
| | | | | ACGCACTCAGTATGACCTAATCAGGTTTAACAGCTAGAT |
| | | | | GGAATCAAATTGTTTCCTCTATTTTGTAATTCATATGGT |
| | | | | TTGCATTTTCGTCTGAAATGGGATTTGGGTACAAAGCCT |
| | | | | GAATGAGAAATTTTGATCGTTAATTTGAATGAAGTGGCT |
| | | | | GCTTTATCTGGGCATTAGATGCTGAAATTGTAATAGGGT |
| | | | | GTATTTTCCTGGACATCTTTTTTCAAAGGATTTGGATTC |
| | | | | TCTAAAGTTCAAACTCAATGAATGGTTGAGATTGAGTGA |
| | | | | AATGTACAACTTTAGAG |
| 73 | Euphorbia | Genomic | 4647 | CTTTAGAGAATCCAAATCCTTTTCAAATTATTTCCTAGA |
| | heterophylla | | | TCTATTGTCGATTTCTCATTTATATTTTCAGTTTTAGGC |
| | | | | AATAACTGAATGATATGCAGTTATGGATGGCTTTGGACT |
| | | | | CTGGTAATGTTTTGTTAATGTACACTACTGCCTCCCAAG |
| | | | | GGCTGAGCATAATGCGGTTTAAACCGAAACACCGATCCA |
| | | | | AACCGAATTATGATATTCGGTTCAGTTATTTAATATTCC |
| | | | | TGTTTTTTATTCGGTTTTCTGTTCGGTCTGGTTTAAGAG |
| | | | | GCAAAAATTGTGAAAAACTGAACCAAATTATAGGTTTTC |
| | | | | ATATGCAAGTAGGCCCAAGCCGAACCCAAACCAATAGTT |
| | | | | TCATTTTCATCTATAAGTCATTATCTAATTCAACCAAAT |
| | | | | GATTCTTTTCTTTTATTTTCTCCAAGTAAACCCCAATTA |
| | | | | ATTGCAATTTTTGATAAATTCTGTTCAGAAAAACCGAAA |
| | | | | TTTAGTCTAAATGTTTTCACTTTCAGCTCTGAAAATTCA |
| | | | | GTTTTTAGGTGTAATTCGTTTCGGTTCGGTAAGCATTTT |
| | | | | TAGATAACTCAGCTGGGCTTATTCAGTTTAGTATAGCCA |
| | | | | AATGTTAAACCCCTGGCCCCTATCGAGCTCTTTCCTCTA |
| | | | | AATTTTTCTAATTGGAATTAACTATCAAATGTGTTTCAG |
| | | | | CTACATACTTGATGGGGTGCCACGAATGAGAGAGAGACC |
| | | | | AATTGGGGATTTGGTAACCGGTCTTAAGCAGCTTGGAGC |
| | | | | CGACGTCAATTGCTCGTCCACAAACTGCCCCCCTGTTCA |
| | | | | TGTAAATGCAAATGGCGGCCTTCCTGGGGGAAAGGTATA |
| | | | | ATATATCGTCTCATTAAGTAAATATGAAAGAACAAGTTT |
| | | | | TCCTCTTGTTTTGACTAGATCCATCATTATTGTATCCCT |
| | | | | TTTAGGTTAAGCTCTCAGGATCAATTAGTAGCCAATACT |
| | | | | TGACTGCTTTGCTCATGGCAGCTCCCCTGGCTCTTGGAG |
| | | | | ACGTAGAAATCGAGATTATCGATAAACTAATTTCCATTC |
| | | | | CTTACGTTGAGATGACTTTGAAGTTAATGGAACGTTACG |
| | | | | GTGTTTCTGTAAAACACACTAGTAGCTGGGATCGTTTCT |
| | | | | TCATTCAAAGAGGTCAAAAGTACAAGTAGGTATTTTCGT |
| | | | | TGATTTACGAATTCCGAAACCCTCGATTTTCGTTCGAAC |
| | | | | AAAAAAATGAAAACCCGGAATGTCAATTAGGTCCCCGGG |
| | | | | AAATTCATATGTTGAAGGCGATGCCTCGAGTGCCAGTTA |
| | | | | TTTCCTGGCCGGTGCAGCAATCACTGGTGGAACTATCAC |
| | | | | TGTAGAAGGTTGTGGCACAACTAGTTTACAGGTATTTTT |
| | | | | TGTAGTTATTGCTTTGTGTTGGTTAAAATTTCAGAATTT |
| | | | | TTTTCGTATTAGGGATACAAAGTGACTTGTTATATGGAA |
| | | | | TTTCAGGGAGATGTGAAGTTTGCCGAGGTTTTAGAGAAG |
| | | | | ATGGGAGCAAAAGTTAGCTGGACAGAGAATAGTGTTACA |
| | | | | GTGACTGGGCCACCGCGAAATTCTCCTCGTGACAAGCAC |
| | | | | TTGCGTGCCATCGATGTGAACATGAACAAAATGCCAGAT |
| | | | | GTCGCTATGACATTGGCTGTCGTTGCGCTTTTTGCTGAT |
| | | | | GGCCCTACTGCCATAAGAGACGGTAACTTCATTTAATCT |
| | | | | TTTCGCAAAAATAAGGCTTAATGCATCTAGACCCCCTAT |
| | | | | AGTTGTCCCTAAAAACCTCTTAGCCCCCTGAACTTGTAA |
| | | | | AAGTGGACCTTATGGCCCCCTGAACTTGTAAAGGTGGNC |
| | | | | CTTATAGCCCCTTGAACTTGGGAAAAGCGAACCTCAAAG |
| | | | | CCCCTTCATGATAACCAGGGCCGTTCCTGGGGCGGGGCA |
| | | | | ATAGGGGCGACGGCCGGGGGCCCAATGGAATAAGGGGCC |
| | | | | CATTTTTAAGGATTATTAAGTTATTTTTATTAAATTAGA |
| | | | | GTTTAAGTTAATTAAATAGTTCTTTTGTGTAAAATATTA |
| | | | | AGAATAAAATACTATTAAATCTAAAGTGATTAGTTAGTT |
| | | | | AAAGACACGTGTTAGCTTTGTTTGAATTAAACTCTAATC |
| | | | | TCATTGATTTTTCTTACCTCCATTATCACCACCATCATC |
| | | | | ATCTCTTAACATTTATTTCCTTACAAATTTTCTTTAGTC |
| | | | | TATTCAACTTCTAAATTTAAAATTGAAGTTGAAGTGCAT |
| | | | | TCATCTTCCATACTATACTGCTATCAATCTCCAAATTTC |
| | | | | ATTCTTGTTCAATCCTTTTAGTACCTATAAATAATTCTT |
| | | | | CATTTACTCTTTCAACAACATGTATCTAAAAAAAAAGTT |
| | | | | AGAGCATGTTGATGTAAACTTTATTAGCGATTTTGCGGT |
| | | | | TAGGTTTACTCATAGACATCATTTTATTTGATCTATGAT |
| | | | | AAAGTTTTAGTTATAGTATTATTTTCTGCTTTATAATGT |
| | | | | GAAATTTTGATGTTCTGTTTAATCTATTATTAAATGTCG |
| | | | | TAGTAAAAGTTCAATATTATATGTTTCATTTTAAATTTT |
| | | | | AACTCATTAATAGGGCCCCGATTTTTATTATCGCCCATA |
| | | | | GGCCCCAAAAAGGTAGGAACGGGCCTGATGATAACATGC |
| | | | | CCAATTTTGTTCCGGTTAATTAATCTTCGATTCAATCTT |
| | | | | TATCAAAACAATCTTGGAGTCAATTTCTAGAAAAATAAT |
| | | | | ATTTGAAATATCAACATCAAGGGCCTGTGGGGTTCACTT |
| | | | | TTAACAAGTTCAGGGAGCTATAATGTCAAGTTTAACAAG |
| | | | | TTTAGGGGGTTCAGGGACCTTTGTAAGTTCAGGGGATTA |
| | | | | AGGGGTTTTTAGGGACAACTATAGGGGGTTTAGATGTAT |
| | | | | TAGGCCCAAAAATAATTATAAATTTGAAAGCGTAGTTTA |
| | | | | AATTGCCAAACCGAGTAAACTGTTTCGGCATTCTCTTGT |
| | | | | TTCCAGTGGCAAGTTGGAGAGTGAAAGAAACCGAAAGGA |
| | | | | TGATTGCTGTTTGCACAGAACTCAGGAAGGTTAGTTGCT |
| | | | | GATAAATTTTGGCTATTATAAAAACAAAACTTATTGGCA |
| | | | | TATAATTATAATTTATAATGTTGGATTAAATTGATTAAT |
| | | | | TATTCCATTATATATTCAGTTAGGAGCAACAGTAGAGGA |
| | | | | AGGAGCAGATTACTGTGTGATAACTCCGCCGGAAAAACT |
| | | | | AAATATAACGGAGATTGACACTTACGATGATCACCGAAT |
| | | | | GGCGATGGCCTTCTCTCTTGCTGCCTGTGGGGATGTTCC |
| | | | | GGTCACTATTAAAGATCCCGGTTGTACTCGAAAAACTTT |
| | | | | CCCTGACTACTTTCAAGTCCTCCAAAGCTTTACCAAGCA |
| | | | | ATGACCACGAACCCCTAAAACATTGGAGTACTAGAAATG |
| | | | | GATCAGGCTCTTATATTCAATGGATCATTCAAGTGAGTT |
| | | | | TATGTTATTAATGTGCCGGACATAACAGATTTTGTTAGA |
| | | | | CAATGTATACCGGATGAATTTGTATTTTATGTTTTGTAT |
| | | | | TTGTATTCTATCAAGTTGATCAGCAATAAATGGGTGAAT |
| | | | | GTGTTAATTTTTGTGATATACTTACAGTGTTATTATTCA |
| | | | | GTTCGACCGGTTTTACTGTGAACCGGCTATGGTCACAGA |
| | | | | GCGATTTAGTTAAAATTGGGTTGAACATGAAAAAATCGG |
| | | | | TAAACCCTTGTGGCAAAAATAAAATGCGTTGCTAAACAC |
| | | | | ATAAAAAAGATTTGTAATAGCCTTATACGTTCTTTTCCA |
| | | | | AAATTCCTTTGGCAACTTTGTGGAACGTCGTAATAGACC |
| | | | | TAGAAAGCGGTGAAATAGTCACTTGAAATCATAAACTCT |
| | | | | CTCTCTATATATACCTTTTAGCCCTTCAATTTCTTTACT |
| | | | | AATTGAAGCAAGTAAAATACAAACTCATTTCTTTTTCAA |
| | | | | GTTAGTGATATAAGTTTGTTTCTTTAACACCCAAAGATA |
| | | | | ACACATCCCCAAGAAGGAATACTCATTCACTTGTTGAAG |
| | | | | AATTATCTTCTTTATTAGTTGAAACATAACTTACATCTG |
| | | | | AATAATCTTCGAAAACCAAAGAAAATTCCGTATAGGTCA |
| | | | | AACCATGATCCTTGGTTCCTTTGAAGTACTTTAATACTC |
| | | | | GGCCTAAAGCTTGTCAACGATGCGAACTATGACTACTAG |
| | | | | TATATCAACCGAGCTTTCCAACAACACAAGCTATATATG |
| | | | | GCTTAGTGCTAATCACATACACACTTTTTATATACACAC |
| | | | | TTGCATACTTGGTTGATAACAAAACCATTAGATAAAATC |
| | | | | ACATCATCGAACTTTTAATGTCACACTTTTCTGTGGGCG |
| | | | | TTTTAGCCCATATAACAAATTCTTTAGCTTGCATACCTT |
| | | | | ATTTTCTCAACCTGACATAACAAACCCTTGAATCTGATT |
| | | | | GTTTTTCGATGCCCGAGACCAAAGAATATCATTATAATA |
| | | | | CCATCTATATAAAAAAATGAGACTGAATCACCTATATTT |
| | | | | CGGATATCAACAGGTTTCCACAACTTCTTCAACACTTAT |
| | | | | TACACAAACTGCCTTAAAATTTACAATTTGATGGGTATA |
| | | | | GTAGATGATTGCAGAAAGGCTTTTTTTAAGCTCAAAAAT |
| | | | | CACGTGGATGACATGGAAAGGAAAAGAGGAAGAAGCTGT |
| | | | | AAAGATAACATCACATTCCTCAAAAACCAATCTCAATCT |
| | | | | AACATTAAATCATTAGGCATGGAACATGTTAGCTTTGTC |
| | | | | TTTATAATTAAAATATTATTTATCTCCATTTTATTTTTA |
| | | | | TTTTTTAATTTTATACACTTTTTCACATGGGCTAGTTTG |
| | | | | TTGGAT |
| 74 | Euphorbia | Genomic | 378 | TTATATTAGCTAAAATTTGGTAGTCTTTGAAATTTAAAC |
| | heterophylla | | | TCAAAAGCTTGACATGTTTTTTGTAGGTCCTCTTGGACA |
| | | | | GGGAATTGCCAATGCTGTTGGTTTAGCCCTTGCAGAGAA |
| | | | | GCACTTGGCAGCTCGATTCAACAAACCAGACAACGAAAT |
| | | | | TGTTGACCACTACACGTATGATAACCTCCTCTATAATTA |
| | | | | TGTTACTTTGTGTTGTTTTGTTTAATGCTAGATTAATGT |
| | | | | GACATGCTGTAATTTAATATTGTTCTGTGTTTATCTTTT |
| | | | | TGTTAGATATTGTATATTGGGAGATGGTTGTCAAATGGA |
| | | | | AGGAATTGCAAATGAAGCTTGTTCCCTTGCTGGACATTG |
| | | | | GGGGCTTGGAAAGCTTATTGCTTTCTA |
| 75 | Euphorbia | Genomic | 220 | GTGTGAATTAGTTAAAAAGACCATTATTTCTAGACGAAG |
| | heterophylla | | | GGAATATTAAGTAAGAAAAAGGGAAAAGCAAAAAAATAT |
| | | | | AAGGACCAATCAAAGACCTAGAAAAAGCTAAAAATAGTG |
| | | | | CCAATACATTGTAGTATAGATACAAATAAAAATAATTCA |
| | | | | CATTACTCATTTATATTACCTTAAAGTATGATTAGTGTC |
| | | | | ACAATTTTACTGTTCTATCTTCTGT |
| 76 | Euphorbia | Genomic | 4459 | GTCTAATGAACTTTGATACTATAATCAATTGGTGAATAT |
| | heterophylla | | | TGTGATTTTATTTTTTATAAGATAATAGGTACTTTATTT |
| | | | | TTCATTATTGTTGGATTAGTGATGTGGAATTCAAACAAT |
| | | | | GGTAGAGTAGCATATAATTTTTAATTATATTTATTACAT |
| | | | | TTATATTATATAATCTCACAAAATATAATTATAAAAGGT |
| | | | | GATATGCTTATATATCTATAATAACCACTATTAATCTTG |
| | | | | GTTGTTAGCAATAAGAGTTAGTCTAAGTGGTGAGTGGTT |
| | | | | TGGTATCGCTTAAGCAAGGTCTTGTGTTTAATTCTGGAG |
| | | | | TACGCAAAAAATTTTATCGAGAGACTCACCTACCATAGT |
| | | | | TAGGTGCGCGACCCGTATCGAATCTGGATGTAGTCGAAA |
| | | | | CAAAGTTTCGGTAAATCAGATGAACAATCGAAGAAAGAA |
| | | | | CCTCAGCGTTTGTTGAATAAGAAATTAGAAGGCTTACCA |
| | | | | AACACAGTATTTTGGTTAGTATTCAAAAGCCCATTTTCA |
| | | | | ATGTCCACCGGGTCCCCACTAAACCTACCCACTTTCTAT |
| | | | | CTCTCACCAAACCTGCCCTTAATGGACCAAAATGCTGAT |
| | | | | TTGGCAAAATCTAATTGGTAAGTTGCTAATCACATAATA |
| | | | | ACAAAATTGACTCTATATCTTCAAAACCTTGGCTATCTA |
| | | | | CCACGTCCCACTACCATACGCCACTTCTCAATCTTACCA |
| | | | | ACCCCTTTTTCTTTTTGGCCCCATAATATTCTTAACATT |
| | | | | TCAATTTAGCGATTTGAGCAAGTCAAATCATTTTTTTAA |
| | | | | TTTCATTTGTCAAACTCCATTTTGAAGAATTTACAGTTC |
| | | | | TTTCATTCTAACTATCATTCTCATTTTTCATATTAAATT |
| | | | | ATCAAAAAATAATAATATTTTATTATTATATTAATTTAT |
| | | | | GTAGATCGTTTATGTTATGTTGTACTGAACTAATAAAAT |
| | | | | AATTAAAAACATCAAAATTCAAACAAAGTAATAAAATAA |
| | | | | TGATTCCCTGAAATAGAGAATGCCCATATACGAGAAACC |
| | | | | CTCGTTTTGAAGAATACCCTATGGAGAATGGTTGGACTT |
| | | | | AGGTCATTTTTATTTAGATTACTACTCAATGTAGTTCAA |
| | | | | TTCAGTAATCAATAAGAATTGGTCCAAGTGGTAAGCGAC |
| | | | | TTAGTATCGCTCAGGCAAGGTCTCGAGTTCGAATCCTGG |
| | | | | TGTATGCAATTCGGATCTGGATGTAGTTGGAGCAAAGCT |
| | | | | CCGGTGAACCAGATGAATAACAAAAAAAATGTAAACTTT |
| | | | | TAGTTAATATTTGTTATTGTAATTGAAAATCAAATAAAG |
| | | | | TTGTGGGTCAAATTTGGAAAATTGTGAAAGATTGGAATA |
| | | | | ATGAAACACCTCAATTGTCGTTACAATAACGCCTAAAAC |
| | | | | CTCACCAATCTCAAATCCAGAGCAGCCATTTTTCTTCTT |
| | | | | CCCCGTTGAGACCAGCAAGAATCAGAGATACACGGAGAT |
| | | | | TGGTGGAGGGGGATCCTGTAGCTCTAGTTAAATGGCACA |
| | | | | AGTTAGCAAATTCTGCAATGGAGTTCAAAAAACCTCCAT |
| | | | | TTTCCCCAATTTTCCTAAACCCGAAACCCCCAAATCCGT |
| | | | | TCCTTCGTTTTCAATCAGGTCAAGTTTTAACGGGTCGCC |
| | | | | GGTTTCATCGGGTCTAAATCGGCGCCGAACAAAGGGCGA |
| | | | | TTGTATTGTTGTTAAAGGTAAAGCTAGTTCGTTTAAAGT |
| | | | | TTCAGCTTCAGTAGCCACAACAGAGAAACCCTCTACTTC |
| | | | | ACCGGAGATCGTGTTGCAACCAATTAAAGAAATCTCCGG |
| | | | | CACTGTCACTTTGCCGGGTTCTAAGTCGCTGTCCAATCG |
| | | | | GATTCTTCTCCTCGCTGCTTTATCTGAGGTATGAATTGT |
| | | | | TCTGGATTTTTCGGCGATTGCATTCTGTGCCGTTGAATT |
| | | | | GTAAGCTGCGGTTTTAGTATAATCATAATTAGATGAAGC |
| | | | | AGAAAGGAACTTAGTTCTTTTGCATTTTATGTTCAGAAT |
| | | | | CACATAGATCACTAATTGTTGGGGAAATCTGGAAATGAA |
| | | | | GGCTAGATAAATATGAAGTTATAGCGAACATTGTGATTG |
| | | | | AAACTTATTGACAAGAACTTAGAACGAATGTTGTTGTGA |
| | | | | TGTTATGAAACAAAAAAGTCTGTAAAACGTTATATTTGC |
| | | | | CAATGCGTTCTCTCTATATATATATATAGAGAACCGAAA |
| | | | | TAACCGTCATATGTTAACTGTTTTTGTAGTTATTTTCGT |
| | | | | CTAAGTCGCGACATGGTCCAAATCCCAAATTCATGAATT |
| | | | | TTCCAAGGGAACTTTTACTTTAGCTCGACCCCAGTTTGG |
| | | | | GGCACTACCCCCGAAATCCGAACATTGAACTTGAACAAA |
| | | | | GCATGCACTCCACACTCTCGTGACTTGTTCAATGAAATA |
| | | | | TCACAATCGCACAACTAGTTGATCTAATTACACTAAAAT |
| | | | | ACTACTAACAACACTTAATCAACAGTCTATCATGTTGTT |
| | | | | GGTTTTTCTTTGAACTTCTGAAGCAGGATAGATAAAGAT |
| | | | | CGTTCCTTCCCACTAATTGATACTATCATTGCATTGACC |
| | | | | TTTAAATTATCTTCTTTTGGTGCATATAGATTACAGATT |
| | | | | TAGTTAAATCACGTAAAGTTTGGGCTGAATTTTTGTTAA |
| | | | | AATAAACTTCAAATTTGAAATCTTTACTAATTTTTCAGT |
| | | | | CCCTAGGTTTCCATATCCCCTTTATTTCTAAAAGCCGTT |
| | | | | GTTTTGTTGGCATGCCTTATAATTGATTTTTGTTTATTT |
| | | | | CTTGCAATAAACAACTTAAAAACTCTGGCCTTGGAAGCC |
| | | | | TTTTTATCTGTGTAAAGTAGTGATTCTGAGTGTTCTACG |
| | | | | TTCAAAATTTTGCTTCTCGAGACCATAAAACGGTGCTTT |
| | | | | ACATCTATTGTCCAGGGCACAACTGTTGTGGACAACTTA |
| | | | | CTAAACAGCGATGATGTTCATTACATGCTTGGCGCACTT |
| | | | | AAAACATTAGGACTACGAGTAGAAGACAATAGTGAACTC |
| | | | | AAACAAGCTATTGTGGAAGGTTGTGGCGGTCAATTCCCA |
| | | | | GTGGGTAAAGAGTCAAAGAAAGACATTCAACTTTTTCTC |
| | | | | GGAAATGCAGGAACTGCAATGCGTCCTTTGACTGCTGCA |
| | | | | GTTACTGCAGCCGGTGGAAATTCTAGGTTTACTTTTCCC |
| | | | | CCTTTTTTTACCCTCTTTAGACATGCCTTGCTTTATAGA |
| | | | | ACAATAAGCACTTATTTTCCACGACTTATGAGATTCTAT |
| | | | | ATGGTTTAACATGTATCTAATGTGTTTCAGCTACATACT |
| | | | | TGATGGGGTGCCACGAATGAGAGAGAGACCAATTGGGGA |
| | | | | TTTGGTAACCGGTCTTAAGCAGCTTGGAGCCGACGTCAA |
| | | | | TTGCTCGTCCACAAACTGCCCCCCTGTTCATGTAAACGC |
| | | | | AAATGGCGGCCTTCCTGGGGGAAAGGTATAAATATATCA |
| | | | | TCTCATTAAGTAAATACGAAAGAACAAGTTTTCCTCTTG |
| | | | | TTTTGACTAGATCCATCATTATTGTATCCCTTTTAGGTT |
| | | | | AAGCTCTCAGGATCAATTAGTAGCCAATACTTGACTGCT |
| | | | | TTGCTCATGGCAGCTCCTTTGGCTCTGGGAGATGTAGAA |
| | | | | ATCGAGATTATCGATAAACTGATTTCGATTCCTTACGTT |
| | | | | GAGATGACTTTAAAGCTAATGGAACGCTACGGTGTTTCT |
| | | | | GTACAACACAGTAATAGCTGGGATCGTTTCTTCATCCCA |
| | | | | GGAGGTCAAAAGTACAAGTAGGTATTTTTATCGATTTAC |
| | | | | GAATTAGGAAACCCTAGATTCTTTCAAACAAAAAACGAA |
| | | | | AACCTTAAATGTCAATCAGGTCCCCGGGAAATTCATATG |
| | | | | TCGAAGGCGATGCCTCGAGTGCCAGTTATTTCCTGGCAG |
| | | | | GTGCAGCAATTACCGGTGGAACTATCACTGTAGAAGGTT |
| | | | | GTGGCACTTCCAGTTTACAGGTATTTTTTAAAATTTCAG |
| | | | | ATTTTTTTTCGTATTAGGGATACAAAGTAACTTGTGATT |
| | | | | GGCTGCTTGTTCTATATGAAAATTAAGGGAGATGTAAAG |
| | | | | TTCGCTGAGGTTTTAGAAAAGATGGGAGCAAAAGTTAGC |
| | | | | TGGACGGAGAACAGTGTTACAGTGACTGGGCCACCACGA |
| | | | | AATTCTCCTCGTGACAAGCACTTGCGTGCCATCGATGTG |
| | | | | AACATGAACAAAATGCCAGATGTCGCTATGACATTGGCT |
| | | | | GTGGTTGCGCTTTTCGCTGATGGCCCCACTGCCATAAGA |
| | | | | GACGGTAACTTCGTTCAATCTTCTCGTGAAAATAATAAT |
| | | | | TAATATTCTTCAAATAATCTGAAAGGACATTTTCTTGAT |
| | | | | TCCAGTGGCAAGTTGGAGAGTGAAAGAAACCGAAAGGAT |
| | | | | GATTGCTGTTTGCACAGAACTAAGAAAGGTTAGTTGCTG |
| | | | | ATAAATTTCGGCTATTAACAAAACAAAACCTATCGGCAT |
| | | | | ATAATTATAAGAGTTAACTTCAAAAACATAACCTGTGGT |
| | | | | TTCACTTATTTTTAAAAGGGGGTCTGTGAAATTTTACAT |
| | | | | TACGAAACATGGTCTGTGGTTTCAAAAACTTTGCAAATA |
| | | | | AAGGATCCTCAAT |
| 77 | Euphorbia | Genomic | 1339 | TATTCAGTTAGGAGCAACAGTAGAGGAAGGAGCAGATTA |
| | heterophylla | | | CTGTGTGATAACTCCGCCGGAAAAACTAAATATAACGGA |
| | | | | GATTGACACTTACGATGATCACCGAATGGCGATGGCCTT |
| | | | | CTCTCTTGCTGCCTGTGGGGATGTTCCGGTCACTATTAA |
| | | | | AGATCCCGGTTGTACTCGAAAAACTTTCCCCGACTATTT |
| | | | | TCAAGTCCTCCAAAGCTTTACTAAGCAATGACCACGAAC |
| | | | | CCCTGAAACTTTACTAGAATTGGATCAGGCTCTTATATT |
| | | | | CAATGGATCATTCAAGTGAGTTTATGTTATTAATGTGCC |
| | | | | GGGCATAACAGATTTTTTATACCGGATGAATTTGTATTT |
| | | | | TATGTTTTGTATTTGTATTCTATCAAGTTGATCAGCAAT |
| | | | | AAATGGATGAATGTGTTAATTTTTGTGATTTACTTAAGG |
| | | | | TGTTATTAATCAGTTCGACCGGTTTTAGGTGAACCGGCT |
| | | | | ATGGTCTCGGAGTGATTTAGTTAAAAATTGGGTTGAATA |
| | | | | GGAAGAATCAAACCCTTATGGCAAAAAGAAAATGTCATG |
| | | | | TTAAACACATAGGAATGCGTTGTAATAGCCCTTTATGTT |
| | | | | TTATTCAAAATTCCTCTGGTAACATGCAGAATGTTGCAA |
| | | | | AGGACCTAGAAAGCAGTTAAATAGCCACTTGAAACCATA |
| | | | | AATTCTCTCTCTATATATATTCTTTTAAGATAAAAAATC |
| | | | | GGTAAAATTAGCAATCATGTCAATAATATTGATTATACT |
| | | | | ACATATCATTAACTTCACGTTTCACGAGTATGAAGTTTG |
| | | | | GTTTGATATTGATAACAATGTGTACTTATTGAAAGGGAA |
| | | | | TTATAAAAATGACTTGGATAATATCTAAAGTTGTAATAA |
| | | | | TACTTTCAAATAGAAACGAAGTTGATGGTTTTCCCAAAA |
| | | | | TTTTTAGTTGAATAAAATCAAAGTAAAATCATGAACTTA |
| | | | | GAATAAATTTTCATTGTGTAAAAAAATGAACCAATAACA |
| | | | | ATCGTTGCTGAAAATATCCTATAAGTGTTGCCAATGCCA |
| | | | | GATTTTTATAAACCTGGAATGAGCATTTGCAATGCTTTG |
| | | | | AAGACAAAGAGTTGCTAAAAGGCGTGTCCATTAGATCAA |
| | | | | TTGCATCTGTTTATAACAAAAACATTGCAAAATGGCATG |
| | | | | TCCATTCGAGCAGTTGCAATAATTCATAACAAAAGTGTT |
| | | | | GCGAAATGTAGCTTCCGGCTCTCATAAGCTAAGTGTCGT |
| | | | | AATAGAATTCGAACAAGCATGCACTTCCTGCTCTCCTGA |
| | | | | CTTGTTCGACGAAATATTACAACCGCATTGATCAACTAG |
| | | | | TTGATCTAATTACACTTACCTACAATCCTCCACATTTTA |
| | | | | GTGTAATCCATGA |
| 78 | Euphorbia | cDNA | 1668 | CGTTTTCAATTAGGTCAAGTTTTAACGGGTCGCCGGTTT |
| | heterophylla | | | CATCGGGTCTAAATCGGCGCCGAACAAAGGGCGATTGTA |
| | | | | TTGTTGTTAAAGGTAAAGCTAGTTCGTTTAAAGTTTCAG |
| | | | | CTTCAGTAGCCACAACAGAGAAACCCTCTACTTCACCGG |
| | | | | AGATAGTGTTGCAACCAATTAAAGAAATCTCCGGCACCG |
| | | | | TCACTTTGCCGGGTTCCAAGTCGCTGTCCAATCGGATTC |
| | | | | TTCTCCTTGCTGCTTTATCCGAGGGCACAACTGTTGTTG |
| | | | | ACAACTTGCTGAATAGTGACGATGTTCATTACATGCTTG |
| | | | | GTGCTCTTAAAACACTGGGATTACGAGTGGAAGACAATA |
| | | | | GTGCGATCAAACAAGCTATTGTGGAAGGTTGTGGGGGTC |
| | | | | AGTTCCCTGCGGGTAAAGAACCGAAAAAGGACATTGAAC |
| | | | | TTTTTCTCGGAAACGCCGGGACAGCAATGCGCCCTTTGA |
| | | | | CTGCTGCAGTTACTGCAGCCGGTGGAAATTCGAGCTACA |
| | | | | TACTTGATGGGGTGCCACGTATGAGAGAGAGACCAATCG |
| | | | | GGGATTTGGTAACCGGTCTTAAGCAACTTGGAGCTGACG |
| | | | | TAAATTGCTCGTCCACAAACTGCCCCCCTGTTCATGTAA |
| | | | | ATGCCAATGGTGGTCTTCCTGGGGGAAAGGTTAAGCTAT |
| | | | | CAGGATCAATTAGTAGCCAATACTTGACCGCCTTGCTCA |
| | | | | TGGCAGCTCCCCTGGCTCTTGGAGACGTAGAAATCGAGA |
| | | | | TTATCGATAAACTGATTTCCATTCCTTATGTTGAGATGA |
| | | | | CTCTGAAGTTAATGGAACGCTACGGTGTTTCTGTAAAAC |
| | | | | ACACTAGCAGCTGGGATCGTTTCTTCATTCAAAGAGGTC |
| | | | | AAAAGTACAAGTCCCCGGGAAATTCATATGTCGAAGGCG |
| | | | | ATGCCTCGAGTGCCAGTTATTTCCTGGCCGGTGCAGCAA |
| | | | | TCACTGGTGGAACTATCACTGTAGAAGGTTGTGGCACTT |
| | | | | CCAGTTTACAGGGAGATGTAAAGTTCGCTGAGGTTTTAG |
| | | | | AAAAGATGGGAGCAAAAGTTAGCTGGACGGAGAACAGTG |
| | | | | TTACAGTGACTGGGCCACCACGAAATTCTCCTCGTGATA |
| | | | | AGCACTTGCGTGCTATCGATGTGAACATGAACAAAATGC |
| | | | | CAGATGTCGCTATGACATTGGCTGTGGTTGCGCTTTTCG |
| | | | | CTGATGGCCCCACTGCCATAAGAGACGTGGCAAGTTGGA |
| | | | | GAGTGAAAGAAACCGAAAGGATGATTGCTGTTTGCACAG |
| | | | | AACTAAGAAAGTTAGGAGCAACAGTAGAGGAAGGAGCAG |
| | | | | ATTACTGTGTGATAACTCCGCCCGAAAAACTAAATATAA |
| | | | | CGGAGATTGACACTTACGATGATCACCGAATGGCGATGG |
| | | | | CCTTCTCTCTTGCTGCCTGTGGGGATGTTCCGGTCACTA |
| | | | | TTAAAGATCCCGGTTGTACTCGAAAAACTTTCCCTGACT |
| | | | | ATTTCAAGTCCTCCAAAGCTTTACTAAGCAATGACCACG |
| | | | | AACCCCTGAAACTTTACTAGAATTGGATCAGGCTCTTAT |
| | | | | ATTCAATGGATCATTCAAGTGAGTTTATGTTATTAATGT |
| | | | | GCCGGGCATAACAGATTTTTTATACCGGATGAATTTGTA |
| | | | | TTTTATGTTTTGTATTTGTATTCTATCAAGTTGATCAGC |
| | | | | AATAAATGGATGAATGTGTTAATTTTTGTG |
| 79 | Euphorbia | cDNA | 783 | ATGTTGAAGGAGATGCCTCGAGTGCCAGCTACTTTCTAG |
| | heterophylla | | | CCGGAGCAGCAATTACCGGTGGAACTATCACTGTTGAAG |
| | | | | GTTGTGGGACTAGCAGTTTGCAGGGAGATGTGAAATTCG |
| | | | | CCGAGGTTTTGGAGAAGATGGGAGCTAGAGTTACCTGGA |
| | | | | CGGAGAACAGTGTAACTGTGACTGGACCACCACGCGATT |
| | | | | CTCCTCGTCAAAAACACTTGCGTGCTATCGATGTGAATA |
| | | | | TGAACAAAATGCCAGATGTTGCTATGACATTAGCTGTGG |
| | | | | TTGCACTTTTCGCTGATGGTCCCACTGCCATCAGAGATG |
| | | | | TGGCAAGTTGGAGAGTGAAAGAAACCGAAAGGATGATTG |
| | | | | CTGTTTGCACAGAACTTAGGAAGTTAGGAGCAAAAGTTG |
| | | | | AAGAAGGGGAAGATTACTGTGTGATAACTCCACCCGAGA |
| | | | | AACTAAATATAACGGAGATTGACACTTACGATGATCACC |
| | | | | GAATGGCGATGGCCTTCTCTCTTGCTGCCTGTGGGGATG |
| | | | | TTCCGGTCACTATTAAAGATCCCGGTTGTACTCGAAAAA |
| | | | | CTTTCCCTGACTATTTCAAGTCCTCCAAAGCTTTACTAA |
| | | | | GCAATGACCACGAACCCCTGAAACTTTACTAGAATTGGA |
| | | | | TCAGGCTCTTATATTCAATGGATCATTCAAGTGAGTTTA |
| | | | | TGTTATTAATGTGCCGGGCATAACAGATTTTTTATACCG |
| | | | | GATGAATTTGTATTTTATGTTTTGTATTTGTATTCTATC |
| | | | | AAGTTGATCAGCAATAAATGGATGAATGTGTTAATTTTT |
| | | | | GTG |
| 80 | Euphorbia | Genomic | 2185 | GACAGACTTTGACCCAGGCAATTGAACAGTACCAGAGAT |
| | heterophylla | | | CTCTTTGATGGGTTGTAACACAATTTCTGGGACAGATGA |
| | | | | AGGTTTCTCAGCTGCAGCAGCAACAGAAGCTTGAATCTT |
| | | | | GGGAACAATTGATGATTGCCCACCAACTCTTTTATTGGT |
| | | | | TAAAGACATGAACTTTGGAGAAATTCTCAAGTTTGATCC |
| | | | | AAAATTAAGAGTTTTTGAAGATTTGGGTAACTGGGTTTT |
| | | | | GGGTAAAGTATGGTGCAATTGACCAGTATGGACACCATT |
| | | | | GTTGATGGTAGTAGCTTGAGCCATTATTCTTCCTCTGAA |
| | | | | TTTGGCGTTGTTTGTTGGCTGAAAAAGTTAGGTGGATTT |
| | | | | TAGGCTTTTAAGAGAGAGAAGGGAAAGAAGAGGGCTTAG |
| | | | | TTCTTACCAAACCAAAGTTTTGGTGGGCAAAGAGAAAGT |
| | | | | GGGTTGGTGTAGACTCTAGTAGAGTAGAGGGAATCATTA |
| | | | | TAAGAGTTTGTTGTTGAATTTTTTAAAAGTTTTTTGCAT |
| | | | | TCCTCCGATTTGCAACACGGTTTACCTACTGTTTATTTG |
| | | | | AATTTTTTGTGTTGAGAAAAGGCTTACAGGCTTGCTCTT |
| | | | | GTATATGTGTATGTATTTGCTTTGTGGTTAAATATGCTG |
| | | | | CATGTTGTAATGAAAACTCTGCCCGGGGATGGTGGGCTT |
| | | | | ACACGCCAAAGAAAAAGATTGTTTTCCACAAGCAAAAAT |
| | | | | ATCCCATTGGCAACAGCGTGCAATTATTTAGGGAATGGT |
| | | | | GTTAGAGCATTAAAATTGGAAAATAAATGAGCTCTCATT |
| | | | | TTGTTCAAACCATGAGAATTTTCCCCTGGTCCAATATTC |
| | | | | AGGCGTTTTGTTTCATTTGTAAAAATTACGATCATATTT |
| | | | | CTCTTTAGTGAAGCAACTGATTGGAAAACTTTGGTATAT |
| | | | | GCCATATCTTTCCAAGTTAAAGAGTTCCCAGGCATCATC |
| | | | | CTCAATGATCTTCCTCTATATTCCTGTACAAATATTGTT |
| | | | | GATAGGAAGTTCATTCATGCCAATAACAATATGTCTCTT |
| | | | | GCGAATTTCTAGAAGACCAGAAATTTGTTGTGACCTGTG |
| | | | | GAGTTCTTCCAAAAGTATCCTCTGTGCGACGCATGAAAA |
| | | | | AAGCCTTTGGGCTAGACTACTGAGATGCAGCTGCCTGGT |
| | | | | AATTCATGCCTCTCTCCCAAGAGAGTACGAGAAGTCATT |
| | | | | TATAGCCGCTTAAGAGAGCCAAGGATCAATTTAGGCGTG |
| | | | | TTCTATTTCCATATCTTAATGTATCACTGAAGTTTAGCA |
| | | | | AGTAAACAAACATCACAATCCCTGATGCTTGCATAGTCA |
| | | | | TGGCAAATGTTATACTCTTTGTTTACATATGAAAAACCA |
| | | | | GATATTACTCCATATTTTTAGAAACCAGCAACCAAAGGA |
| | | | | GCTTAAATGGTCCCTGCTCCTAAGTCATATCTCTTGGCA |
| | | | | ATGGGGTGTTTGTAGATCTTGAGTGCTGCCAGTCCACTT |
| | | | | ACTGTAATGCAATACATCAATATTGAGCTAGTTTCTCAT |
| | | | | GGGAAAAAACCATAGAAATGGGACAAATTTGATGTTAAT |
| | | | | GTTCTGTAATCCAACTTGAGGATTAGTTTTATCACATAA |
| | | | | AAGCTACATTGAAAGTTCTATTATTATTTTGAGTTTGCA |
| | | | | TCTTATGTTGTTTTTCCTTTGTGATTTTATCCATTTTCT |
| | | | | TAACTAGTTATTCGTTTCCTGAAGTTTTTAGTGTCATAA |
| | | | | CTCCTAATCACAATCATGCTACAGGGCACAACAGTGGTC |
| | | | | GACAACTTGCTGTATAGTGATGATATTCTTTATATGTTG |
| | | | | GACGCTCTCAGAACTCTTGGTTTAAAAGTGGAGGATGAT |
| | | | | AGTACAGCCTAAAGGGCAGTCGTAGAGGGTTGTGGTGGT |
| | | | | CTGTTTCCTGTTGGTAAAGATGGAAAGGAAGAGATTCAA |
| | | | | CTTTCCTTGGTAATGCAGGAACAGCGATGCGCCCATTGA |
| | | | | CAGCTGCGGTTGCCGTTGCTGGAGGAAATTCAAGGTTTG |
| | | | | TCCAATTATATTCTTTATGTGAGTGTTGTTTTTTGTGTT |
| | | | | AGTTTCAATCATGAAGGTACTAATGCAGAAGCCGTACCC |
| | | | | CTGAAATTTTCTTATTTTGTATATATCAATTGGTAATTG |
| | | | | ATGTAAGATATTTTTCCGAGAGGAATAAAAACAGGGGGA |
| | | | | TAGAGAATATTAAAGTATTGTTCTATCACATTAACTTTT |
| | | | | TATCAAAGGTGTACATTGTGTTTGTGAAGTTTATAGAGC |
| | | | | T |
| 81 | Euphorbia | Genomic | 1702 | ATTTTCCTGAACATCTTTTTTCCAAATTATTTCCTAGAT |
| | heterophylla | | | CACTGTGAATATCTCATTCATATTTTCAGTTTTATGTAA |
| | | | | TAACTGAAGGATACGCAGTTATGTATGGCTTTGGACTCT |
| | | | | TTGTACACCACTGCCCCCCTACTAGGGCTGAGCATAATG |
| | | | | CGGTTTTAACCGAAACACCGACCCAAACTGAATTATGAT |
| | | | | ATTTGGTTCGGTTATTTAATATTTCAGTTTGTTATTCGT |
| | | | | TTTTCTGTTCGGTCTGGTTTCAAGAGGCAAAAATTGTGA |
| | | | | AAAACTGAACCAAATTATAGGTTTTCATATGTAAGTAGG |
| | | | | TCCAAGCCAAACCCAATCCAATAGCTTCATTTTCATATG |
| | | | | CAAGTCATCATCTACTTTAACCAAATAATTCTTTTCTTT |
| | | | | TACTCTCTCCAAGTAAACCCCAATTAATTGCAATTTTTG |
| | | | | TTAAATAAATTCTGTCTGTTCAGAAAAACCGAAATTTAT |
| | | | | CCGAAATGTTTTCAGTTCTGAAAGTTTTATTTTTGGCTG |
| | | | | TAATTCGGTTCGGTTTAATAAGAATTTTAGAAAACTCAG |
| | | | | CTGGGCTTATTCGGTTTGGTTTACCCACATGCTCAACCC |
| | | | | CTGGCTCCTATTGACCTCTTTCCTTAAATTTTTTCTAAT |
| | | | | TGCGATCAACTATCAAAAATGTTTCAGCTACATACTTGA |
| | | | | TGGGGTGCCACGTATGAGAGAGAGACCAATCGGGGATTT |
| | | | | GGTAACCGGTCTTAAGCAACTTGGAGCTGACGTAAATTG |
| | | | | CTCGTCCACAAACTGCCCCCCTGTTCATGTAAATGCCAA |
| | | | | TGGTGGTCTTCCTGGGGGAAAGGTATAAATATATCATCT |
| | | | | CATTAAGTAAATACGAAAGAACAATTTCCTTCTTCTTTT |
| | | | | GACTAGATCCATCATCATTGTATCGCTTCTAGGTTAAGC |
| | | | | TATCAGGATCAATTAGTAGCCAATACTTGACCGCCTTGC |
| | | | | TCATGGCAGCTCCCCTGGCTCTTGGAGACGTAGAAATCG |
| | | | | AGATTATCGATAAACTGATTTCCATTCCTTATGTTGAGA |
| | | | | TGACTCTGAAGTTAATGGAACGCTACGGTGTTTCTGTAC |
| | | | | AACACACTAGCAGCTGGGATCGTTTCTTCATTCAAAGAG |
| | | | | GTCAAAAGTACAAGTAGGTATTTTTATCGATTTACGAAT |
| | | | | TAGGAAACCCTAGATTCTTTCAAACAAAAAACGAAAACC |
| | | | | TTAAATGTCAATCAGGTCCCCGGGAAATTCATATGTCGA |
| | | | | AGGCGATGCCTCGAGTGCCAGTTATTTCCTGGCAGGTGC |
| | | | | AGCAATTACCGGTGGAACTATCACTGTAGAAGGTTGTGG |
| | | | | CACTTCCAGTTTACAGGTATTTTTTAAAATTTCAGATTT |
| | | | | TTTTTCGTATTAGGGATACAAAGTAACTTGTGATTGGCT |
| | | | | GCTTGTTCTATATGAAAATTAAGGGAGATGTAAAGTTCG |
| | | | | CTGAGGTTTTAGAAAAGATGGGAGCAAAAGTTAGCTGGA |
| | | | | CGGAGAACAGTGTTACAGTGACTGGGCCACCACGAAATT |
| | | | | CTCCTCGTGATAAGCACTTGCGTGCTATCGATGTGAACA |
| | | | | TGAACAAAATGCCAGATGTCGCTATGACATTGGCTGTGG |
| | | | | TTGCGCTTTTCGCTGATGGCCCCACTGCCATAAGAGACG |
| | | | | GTAACTTCGTTCAATCTTCTCGTGAAAATAATAATTAAT |
| | | | | ATTCTTCAAATAATCTGAAAGGACATTTTCTTGATTCCA |
| | | | | GTGGCAAGTTGGAGAGTGAAAGAAA |
| 82 | Euphorbia | Genomic | 1400 | TCAACCAAATGATCCTTTTCTTTTATTTTCTCTAAGTAA |
| | heterophylla | | | ACCCCAATTAATTGCAATTTTTGATGAACTCTGTTCAGA |
| | | | | AAAACCGAAATTTAGTCGAAATGTTTTCACTTTCAGTTC |
| | | | | TGAAAATTCAGTTTTTAGGTGTAATTCGGTTCGGTTCGG |
| | | | | TTCGGTAAGCATTTTTAGATAACTCAGCTGGGTTATTCG |
| | | | | GTTTAGTTCAGCCAAATGCTAAACCCCTGGCCCCTATTG |
| | | | | AGCTCTTTCCTCTAAATTTTTCTAATTGGAATTAACTAT |
| | | | | CAAATGTGTTTCAGCTACATACTTGATGGGGTGCCACGA |
| | | | | ATGAGAGAGAGACCAATTGGGGATTTGGTAACCGGTCTT |
| | | | | AAGCAGCTTGGAGCCGACGTCAATTGCTCGTCCACAAAC |
| | | | | TGCCCCCCTGTTCATGTAAACGCAAATGGCGGCCTTCCT |
| | | | | GGGGGAAAGGTATAATATATAGTCTCATTAAGTAAATAT |
| | | | | GAAAGAACAAGTTTTCCTCTTGTTTTGACTAGATCCATC |
| | | | | ATTATTGTATCCCTTTTAGGTTAAGCTCTCAGGATCAAT |
| | | | | TAGTAGCCAATACTTGACTGCTTTGCTCATGGCAGCTCC |
| | | | | CCTGGCTCTTGGAGATGTAGAAATCGAGATTATCGATAA |
| | | | | ACTAATTTCCATTCCTTACGTTGAGATGACTTTGAAGTT |
| | | | | AATGGAACGTTACGGTGTTTCTGTAAAACACACTAGTAG |
| | | | | CTGGGATCGTTTCTTCATTCAAAGAGGTCAAAAGTACAA |
| | | | | GTAGGTATTTTCGTTGATTTACGAATTCCGAAACCCTCG |
| | | | | ATTTTCGTTCAAACAAAAAAATGAAAACCCGGAATGTCA |
| | | | | ATTAGGTCCCCGGGAAATTCATATGTTGAAGGCGATGCC |
| | | | | TCGAGTGCCAGTTATTTCCTGGCCGGTGCAGCAATCACT |
| | | | | GGTGGAACTATCACTGTAGAAGGTTGTGGCACAACTAGT |
| | | | | TTACAGGTATTTTTTGTAGTTATTGCTTTGTGTTGGTTA |
| | | | | AACTTTCAGAATTTTTTTCGTATTAGGGATACAAAGTGA |
| | | | | CTTGTTATATGAAATTTCAGGGAGATGTGAAGTTTGCCG |
| | | | | AGGTTTTAGAGAAGATGGGAGCAAAAGTTAGCTGGACAG |
| | | | | AGAATAGTGTTACAGTGACTGGGCCACCACGAAATTCTC |
| | | | | CTCGTGACAAGCACTTGCGTGCCATCGATGTGAACATGA |
| | | | | ACAAAATGCCAGATGTCGCTATGACATTGGCTGTCGTTG |
| | | | | CGCTTTTCGCTGATGGCCCTACTGCCATAAGAGACGGTA |
| | | | | ACTTCATTTAATCATTTCGCAGAAATAAGGCTTAATGCA |
| | | | | TCTAGACCCCCTATAGTTGTCCCTAAAAACCTCTTAGCC |
| | | | | CCCTGAACTTGTAAAAGTGGACCTTATGGCCCCCTAAAC |
| | | | | TTATAAAGGTGGACCTTATAGCCCCTTGAACTTGG |
| 83 | Euphorbia | Genomic | 584 | TCTAGAGACGGTATTAACTCCTTTCTGATACATTACACT |
| | heterophylla | | | TTTCTTGTGCTATATATTGTTTCAAATTTGATAATTCGA |
| | | | | TCATGCTTCAAATTTTGCACACAGCCGTAATCCATGGTT |
| | | | | ATAAAATGACTATGACACTTGTCTTGTTACTGAAAAGTG |
| | | | | CATACAGTAACAAAGCTGATGTTACTTCTTAGTTTACTC |
| | | | | TAATAATGGTTGGACGGTCACTGGCGCACATCCCCATGG |
| | | | | TTGGAAGTTGTGAATATTGTTGTCATAATGGCTTATGGA |
| | | | | GCATCTTTTGGTACACTTCAGGAGTAAAAGACCACTAGT |
| | | | | CCAGTATAGGGTTAATCACCTCTAGAACTAGTTAGTCAC |
| | | | | ATATACTCGGAAAATTATTCATATTTTGTGGTTACATGC |
| | | | | GTTCGTTTATCTGCATCTTGCCTAGTGTCTCCTCTTGAA |
| | | | | ATCATTCATATATGTTCTTTTTTTCCCCTTCATCTGTTA |
| | | | | CATGTTCAAAATATGCTTACAACGAAATTGGGTAACTTG |
| | | | | ACCAGTTGCTAGCTGGAGAGTGAAGGAAACAGAAAGGAT |
| | | | | GATTGCCATCTGTACAGAACTCAGAAAGGTTAGCCACA |
| 84 | Commelina | cDNA | 1250 | CCCAAATCAAAATGGCCGCCAAAACCCTAGCTCTCTCGC |
| | diffusa | | | CGTCGTCGCCGGCGGCGATCGCCGGAGCTCGCCGGAGCT |
| | | | | CACCAGCGCCGCCGCCGGCGCTGGTACGGCTCGGATCCG |
| | | | | GCCCAAAGGCGGCGCCTTTGGGCGCTCTGAGGGTCTTTG |
| | | | | GGCGGCGGCCGGCGGCGCTGCGGGTCGCGGCGGCGGCGG |
| | | | | CGGTGAAGACGGCGGCGGCGGCGGAGGAGGAGATAGTTT |
| | | | | TGGAGCCGATTCGGGAGGTTTCGGGGGTTGTGAAGTTGC |
| | | | | CCGGATCGAAGTCGCTGTCGAACCGGATTTTGCTGCTCG |
| | | | | CGGCGCTGGCCGAGGGAACAACCGTAGTGGACAACTTGT |
| | | | | TGAACAGTGACGATGTCCGCTACATGCTTGCTGCTCTGA |
| | | | | GGACCCTGGGACTATCCGTGGAGGATGATGTTGCAACCA |
| | | | | AAAGAGCGGTTGTTGAGGGATCTGGTGGCCACTTCCCAG |
| | | | | TCGGTAACGAATCAAAAGAAGTTGAGCTGTTCTTAGGAA |
| | | | | ATGCGGGAACTGCAATGCGACCACTAACTGCTGCTGTTA |
| | | | | CAGCAGCTGGTGGAAATGCAAGCTACATACTTGACGGGG |
| | | | | TGCCAAGGATGAGGGAAAGACCCATCGGAGATTTGGTTG |
| | | | | ATGGCTTGAAGCAGCTTGGTGCTGATGCTGATTGTTTCC |
| | | | | TTGGAACCAACTGCCCACCCGTTCGTGTAAATGCAAAGG |
| | | | | GAGGTCTTCCCGGTGGAAAGGTGAAACTCTCTGGATCGA |
| | | | | TTAGCAGCCAGTACTTAACTGCTTTGCTCATGGCAGCTC |
| | | | | CTTTAGCCCTTGGAGATGTTGAGATTGAGATCATCGACA |
| | | | | AGCTCATATCGGTCCCCTATGTTGAGATGACTCTGAAAT |
| | | | | TGATGGAACGTTTTGGCGTTAAGGTAGAGCATTCTGAAA |
| | | | | GCTGGGACAGGTTCCTCATCAAGGGTGGTCAGAAATACA |
| | | | | AGTCTCCAGGTAAAGCTTATGTCGAAGGTGATGCATCGA |
| | | | | GCGCTAGTTACTTCTTGGCCGGTGCTGCAGTCACTGGTG |
| | | | | GCACTGTCACCGTTGAAGGTTGTGGTACGACCAGTCTGC |
| | | | | AGGGTGATGTGAACTTTGCTGCAGTTCTTGAGAAAATGG |
| | | | | GTGCAAAAGTTACATGGACTGAGAACAGCGTTACAGTTA |
| | | | | CTGGTCCACCACGCGATCCTTCGAAGAGAACAAACTTGC |
| | | | | ACGGAATTGATGTTAATATGAATAAAATGCCAGACGTCG |
| | | | | CTATGACACTTGCGGTTGTTGCACTGTTTGCTGACGGCC |
| | | | | CT |
| 85 | Commelina | Genomic | 9352 | TTATTATTATTATTTTCATTGTTCCGGCTAGTTCTAGCC |
| | diffusa | | | CCCCCACTGTCCATCTTCCCGTCTACCGCCCTCCTACAT |
| | | | | CCTCTCTCACCCATTTCAGCCCCTCTTCCACACCTGACC |
| | | | | ACTCACAGCCGACGGCCATCTAATCATACTTAGAGGACA |
| | | | | TGTTCTAACAAAAAGATTAGGCTTCCACCTTTTAATACG |
| | | | | AAAAATTAAAGAAATAATTATAAAATTTTAAATCACTTT |
| | | | | CGAAACAACACAAAAAAAAAAAATAAAAAAATGCAACAT |
| | | | | CCTTGATAATAAACTCAAACTAGAAAAATAAACTAAAAC |
| | | | | AAAACCAAAATTTCAAAGTTGTTCTATAAAAAAAAAATA |
| | | | | AAAAAATTCCAAGACTTGCTTCTTCGGCTCTTTTGTAGT |
| | | | | CGATCGGTCTTCAAGACAAGTTAGCTGCTATGCTCGACT |
| | | | | CTTGGAGAAATGTTCATTGCTTGAGCTTGAACCCACCTC |
| | | | | AAACTCTTCGGATAGGCGGTCTCTTCTCCCTACTCCCAC |
| | | | | TTTGTCTTCGGTTCCGAGGAAGAATGCCATCTTTTCTAC |
| | | | | TTCCCCCATCTCTTTGGTTCTCTCAGCCACTCCCTCGGG |
| | | | | GCTTTCTAGGATGTCTCGAGGCAGAACGAGAACCATGGT |
| | | | | GTCTAGGTACTCAGTCGATGTTTGACCTCTCGGAGCTCG |
| | | | | AAGCACGAGGAAGTCGAAACGATGAGAGAAGGTTTGTTT |
| | | | | GTCACCGCTCGGCGTGGCGCAACGTTATCGTAGGTGATT |
| | | | | CCGCGATTCAGGTTAAGCACAGCCTCGATCCAGCTAATG |
| | | | | GATCAGAATAGGGGAGTCTCTTCACTGTAGATTTTTTTT |
| | | | | CTTCTTGAGTTGTTTCACTTTGTTCTTATGGTGGGACCC |
| | | | | TTCGGGGTCCCATATACGTAGGTGCGCACCGATGTTTGT |
| | | | | TTGTATGGCTGTGGACGTCCTTATGTCAACTTTTTCGGC |
| | | | | TTCCCTTCTTGGATCCCAAACACGAGAGGTGCACCGCCA |
| | | | | CTGCATATGTGCACCACACTTTTTCATTCTACTAATACT |
| | | | | AGGTCGTATAGTTCGGGTTGAAAAAAGAATAAAATAATA |
| | | | | AGGGTGTTATACATATTTTTAATGATCTTAGTAAAGCTT |
| | | | | TTGGTTTGATGATATAAAATGTGTTATTTTTGTTTGAAT |
| | | | | ATATGACTACTTCATACATAACTTTTATGATGTCAGTAG |
| | | | | GAATTTTGCATTGATTGTATAAATGTGTCATCTTGCTTA |
| | | | | AATTAAACAAATTCATAACTGGTTTTATACATATTTTTT |
| | | | | ATGATCTTACTAGGACTTCTGCATTGATTGTATAAAGGT |
| | | | | GTTATTTTTGCTTGAATTTATGACTATTTTTATACATAA |
| | | | | CTTTTATGATCTTAGCCTAAATTTTGCATTGATTGTATA |
| | | | | AAGGTGTTATCTCGCTTGAATTTATGATTGGTTGGAATT |
| | | | | TTGTGTATTTGCATTGTATATTGATTGTATAAAGGTGGC |
| | | | | ATCTTGCTTGAATTCATGAGTAGTTTTATTCATAACTTT |
| | | | | TATTATCTTAGTAGGACTAATGTATTGATTATATAAAGG |
| | | | | AAGGAGTCATTTTACTTGAATTTAGAGAGGAGTTTTAGT |
| | | | | TATGTGATTGCTGAGAAATGGAAATCATATTGTTTAATG |
| | | | | GTTGGTAACTTGAACCTTGGGAGAGTGACTATGACTACT |
| | | | | TTAGCATTTTACATATATTATAAGATTCAATGTTTGGTA |
| | | | | GCAGAAAGTATATGCTTTTGAAAAGATCTTTCAGGAGCC |
| | | | | TTGTATCACAATTAACAACTCAATCTGCTAAATCTGAGG |
| | | | | ATAATTGGAGTGTTATACTTGTAGAATGTTAGATTGCTT |
| | | | | ATTTACTTAAAAAATATTCGTCATATATAGGCTGTTCAT |
| | | | | TGATAGCTATGGTATTTTCGGTCAATCTGTCTATTCAAC |
| | | | | AAATAAATGGGAGTTTCATCTATCAATATTTATGATCTT |
| | | | | GGTCATCAATAATGAATTTTCCTTAAGAGTTTGTATACT |
| | | | | TGATTGATCTGCTAACTCCTATTATGTCAATGCTAATTA |
| | | | | CTATTGTCGGAATCTTAGTTCTTATAGGGGAATTGAAGA |
| | | | | ATGTTGTTAGCTTTATTTTTCCGCAACTGATTGCCATTA |
| | | | | ATTCGATCAGGGAACGACCGTAGTGGAGAACTTGTTGAA |
| | | | | CAGCGACGATGTCTCCTATATGATTGCTTCCTTAAGGAC |
| | | | | ACTGGGAATCTCTGTTGAACATGATGTTGCAACCAAAAG |
| | | | | AGCACTTGTTAAAGGATCTGGAGGCCAATTCCCAGTCGG |
| | | | | TAACGAATCGAAAGAAGTTAAGCTGTTCTTAGGAAACGC |
| | | | | GGGAACTGCAATACGACCACTAACTGCTGCTGTTGCAGC |
| | | | | TGCTGGTGGAAATGCAAGGTTTTTTATCACATTTTAAAT |
| | | | | CCTGGCAATGTTTCTTCGTCTGCGTATTCCTAAATTCTA |
| | | | | TTTTTCTGTTTATCTTCAGCTACGTACTTGATGGGTTGT |
| | | | | CGAGGATGAGGGAAAGACCCATCGGAGATTTGGTCGATG |
| | | | | GCTTGAGGCAGTTTGGTTGCGATGCTGATTGTTTCCTGG |
| | | | | GAACCAACTGCCCACCCGTTCGTGTAAATGCGAAGGGAG |
| | | | | GCCTCCGTGGTGGAAAGGTTTGTATGACAATTAGTTGAT |
| | | | | CCAAGAGAGTTTCATGCCATGCTTCACCACCGATGTTTA |
| | | | | CTCAACAAAAGATGCATAAGAAATGAAAGCAAACCACTC |
| | | | | TATTCTGACCAAAGATCCGGTCGAATATGGTCATATTCG |
| | | | | GTTGGAAATTCATATTTTCTGACTGAAAAACCAGTTGTA |
| | | | | GTGATCGGTTGTCTCAGGCCTGGTCGCAAACTGAACCAC |
| | | | | CCCTCAATTCGAAATATACGGTCAGAATAGGACCTGACT |
| | | | | TTTGTAGTGTATGCCCGACAAGTGCTACGCCAGTCATTG |
| | | | | GTATAAAAAAATTAGGGATATGCTTTAGTATCCATGGAA |
| | | | | CAAGAGTAGCCCGGTTCGTTTTCCCAAATTAGTGCTAAA |
| | | | | ATTTCAAGAATGAGTTATTCCTGTGCTCAAAAGATATAT |
| | | | | ATCACTCCTGCCTAAACTTGATTTTAGCTTATCTTTGAT |
| | | | | TAGAGAATTGATGTAGTTAATTCAATTTGCCTAATGATA |
| | | | | GGACTAACAAAAATCCAAAAAAAAAAAAACTTTGATAAT |
| | | | | GCTAAAGACTATTAACTATGCTGATTCATTTTTTGTTTT |
| | | | | TTAATTGATAAAGGTAGTCTTGTTTCCTATTTCCTTCTT |
| | | | | GTTTTTTTATCAATAGAAACTAGGATTTGGAATTGGCTT |
| | | | | GCTAAGACCCTATGATTAATTCGATTGAAAGAGTAACTA |
| | | | | GATGCTGCTGGTGACTAGAAGATGAAGAAGGCGAGAGAT |
| | | | | CGTATTCCATTCCAGTAAATTTAGTGGAATCAAGCAAAA |
| | | | | TGATTCGTCATCGAAGACTAAATAGTATATCATAGGATC |
| | | | | TTGTAAATTCAAAAGGGTTTTCATTTTTGAATTAGGATG |
| | | | | TAACCGAAGTTGATGAACTTGTTTTATAAGGTCTAAGTT |
| | | | | GTTTGTTCCTTTCACTTCCTGCAGATAACTTTTTTTCGA |
| | | | | ATCTTCTTGCATTATGTGTATCTTTTGCTTAATATATAC |
| | | | | ACTCGTAGATTAATGGCTTGGCATCTCTGTACGCAGGTG |
| | | | | AAACTCTCTGGATCGATTAGCAGCCAGTACTTAACTGCT |
| | | | | TTGCTCATGGCAGCTCCTTTAGCCCTTGGAGACGTCGAG |
| | | | | ATCGAGATCATTGACAGGCTCATATCGGCCCCCTATGTG |
| | | | | GAGATGACTCTAAAAGTGATGGAACGTTTTGGCGTTAAG |
| | | | | GTAGAGCATTCCGATAGCTTGGATAGGTTCCTCGTCAAG |
| | | | | TGTGGCCAGAAATACAGGTCAGTATTCAAGTGACTAAAT |
| | | | | CACATTAACATTATCGGCATCACATGTGTGCACATTCTC |
| | | | | TTCTTTGTGGCAGGTCTCCAGGAATAGCTTATGTCGAAG |
| | | | | GCGATGCATCGAGTGCCAGTTACTTCTTAGCTGGTGCTG |
| | | | | CAGTCACTGGCGGTATCGTCACCGTTGAAGGCTGTGGTA |
| | | | | CCACCAGTCTTCAGGTATTTTTATTACTTTGAAACTGTA |
| | | | | CAAAATCCTTTGTTTCTTATCGTCGAATAAAATGATGTT |
| | | | | TCATCTTGTGTTTTCTGCTTAGGGTGATGTGAGATTTGC |
| | | | | TGAAGTTCTTGAGAAAATGGGAGCAAAAGTTACATGGAC |
| | | | | TGAGGACAGTGTTACGGTTACTGGTCCACCACGCGATCC |
| | | | | TTCAAAGAGAGGGAACTTACGGGGAATCGATGTTAACAT |
| | | | | GAATAAAATACCGGATGTCGCTATGACGCTTGCAGTTGT |
| | | | | TGCATTGTTTGCCGATGGCCCTACGGCTATAAGAGATGG |
| | | | | TTAGTTATCGAAAGAAAAATTAGCTGCAAAAGCACTAAA |
| | | | | GAATATCGAATTCAATACCAAATTGCACACGGTGTTTGA |
| | | | | TAACCAACTATCTCAATCTACTTCTGTTTAGGGTCTATT |
| | | | | TGATTTGAGAGACTTGAGAATTAACTTCTGTAGTTGGTA |
| | | | | CTACAATCTAAATGGTGTAATGCGAACTGCGGCAGTTGA |
| | | | | AAGTTTTTTAACATACAAGACGGATTCCGTGACTTATAA |
| | | | | CTCAACTACATCAAACTAAACAAGCGATACAAAATTACT |
| | | | | TCATTTAACTACTCCAGTTCAACTTTAACTACATCAAAC |
| | | | | TAAATAGCCTCCTAGCAGCACAAAAACTCTAATCAACGT |
| | | | | TGCAGCGTTCACAGAACAAGAAAGTGCCAACACTCACAC |
| | | | | TTATATACGATATGCAGAATCTTTTTTATTCGAAATATC |
| | | | | TTCTTTATTAACTTGTTTTCTCTATTTTTAGTGGCTTCT |
| | | | | TGGAGAGTTAAGGAGACGGAGAGGATGATAGCCATTTGC |
| | | | | ACAGAGCTCCGAAAGGTCGGTAATGTTCATTCTCTTGTA |
| | | | | ACTTAGCTCTCGGTTTTCACATTCTGATTTTTCTATTGT |
| | | | | ATTATGTTTTGGTTCAGCTCGGTGCTACAGTTGAAGAAG |
| | | | | GGCCAGATTATTGCATTATCCATCCACCTGAAAAGCTGA |
| | | | | ACGTAACGGCTATCAACACATACGACGATCACCGGATGG |
| | | | | CAATGGCATTCTCTATTGCTGCCTGCGCCGACATCCCCG |
| | | | | TTGCAATCAAAGACCCTGGTTGTACTCGCAAGACTTTTC |
| | | | | CGGACTATTTTGATGTTCTGCATAGTCTTGCCAAGTACT |
| | | | | GAACGAAACCTACGAAAGTTAATTTAGTCGACTTGGTTG |
| | | | | GTGAATCAGTTTTCATGTAAAATTGTGTAATTCGTGTAT |
| | | | | TAATAATCTTTTTCATACAAAATAAACACGGCAAAATTT |
| | | | | TCTTTAGCAACAATTGAGTTGATCAAAACACAGCACAAT |
| | | | | TATTTTGGTACAAAAATATTTTCATATATTAACATAACT |
| | | | | AACCAACTAACTAGTTTGTCTAGAAAATAAAAGCTAAGA |
| | | | | AACAAAAATCATAACAACAAATCAGTAGGCAGTTTATAA |
| | | | | CTGAAATAACTGCCCTCTAGTTTAAACACAACAAAGCCC |
| | | | | TTTCCTTCCCTCCAAAACTAAAACTTCGACCGATTCTCC |
| | | | | GAAAATTCCTTCTCTCCCACCCCCATTTCCTCCCATCTT |
| | | | | CTAGGACTCCAAAGTCATCTTTCCCCTCTCCACCACAGC |
| | | | | TGAACCTTGGTCAGTACAGCCCTGGAGATTGAGGGATAA |
| | | | | TACTGTCAGTGCTATCGTTCGATGTTGGGACAATATCGA |
| | | | | GTGCCTAAAGTCTTCTGTTCCTTTTATGCAGCAACACCT |
| | | | | CAAAGAATTCCGGGTCCCATTTTCCTTTCCTTCCCCTTT |
| | | | | GGAGTTTGTTGGTGATTGTTGTTTTTGTTTGTTTGGTGG |
| | | | | TAGGAAATGATGGAGAGTTATGGGGTAAAGTTGGAGAGA |
| | | | | TGTTGTGAGGAAATTGAAATGAAGAGGGTGGAGATGGAG |
| | | | | ACCGAGGATGTCGAGCGAAAGAAATTGGAGGAGGAGAGA |
| | | | | TCATTGACGCTCCTGTGGGATTTTGGGCCTAGCGTGGAC |
| | | | | TAGTTGTAGACGGGTGGTTTGTCGAGATTTCTCCTGTAG |
| | | | | AGCGTCCTCGGACTTTCTCTAGATTTCTTTGTGGGTTCT |
| | | | | CAAGGAGGGTCCCCCATAAGGTTTGGGCCACTAGGATGA |
| | | | | TGTCAACATGTGCGCTAGGTGAACCTAAGTTCGTTATGA |
| | | | | CTTTGCGTGCGTCATATGATCCGTACTGGACGAACATGA |
| | | | | GAAAGGAGTGAGACACATGCCCCTTGCTTAGTGCCAGTT |
| | | | | GTACTTTTTGTAGGATTTGGGAATGGCTCCCAACTCTTG |
| | | | | AGTCATTAGTGTGGTATTTGTGCCATTAATGCATGGATC |
| | | | | TTCGGGGGTGAGCCCTAAAGACGAGGTCCTACGATCGTG |
| | | | | GGTGTTGGGGATTTAGCCATCCTAAGCATGGGGCTCCTG |
| | | | | GATCTCTGAGGACATTTGTCACGGGGCCGTTGGATCCCC |
| | | | | AGACATATCATGACACTCTTACAAGTGTCTGAGCCTGAC |
| | | | | TGTTCTTGGAATCGCTGGGTCCCAAGACGGATTAGTCAT |
| | | | | TATCCTCTATAGGCCCGTCTTGAAAAATGTTGAGGCCTT |
| | | | | GTGCCAAATTAAAAATAGGGCTTTAACTAAATAAAATAA |
| | | | | ATAAATTTTAATTTTTCGAATACATTAGTCTCTTCCTTA |
| | | | | AAACAACAAAAACTATTAACAAAATAAAAAAATCAATAC |
| | | | | AATACATTAAAATGAAGCTATGAAACAATCGGAGCAATC |
| | | | | ACGAAATACCAACATAACAGTCTAAAATAGCAAAAATTA |
| | | | | GTATATAACTCTTAAAAAATTACACAAATTATATAGCTA |
| | | | | TACTTAAAAAATAAATAATTAAAAAATAAATTTCTAATA |
| | | | | AGTGGAGGATATGGATTGGGCACCCTTAAAGTGGAGGCC |
| | | | | CTGTGCTGTAGGGCTAATAGAACCCCCCACAGAGACCCC |
| | | | | TTATCCTCTAGTTTGTCTTTGATTTTTACTCTTGTTGTC |
| | | | | AATATAGAAGAACAAAAGAGAATAATCTAGTGTGCTTTT |
| | | | | TCTTGTTGTTGTGGTTAATTTTATTGTTTTTGATATGGA |
| | | | | AGAATGCAATAACACTATTGTGTTTCTTGTTGTTGTCGT |
| | | | | CGTCAAAATTCTTCTCATTGTTCTTAGTGTTGACAGATG |
| | | | | GTATTTGGTAATATTTATGAATTTTTTTTGTTGAAGTAA |
| | | | | TATAATCCAATGTTCTTTTTGTTCATGTTAGATTCAACG |
| | | | | AATGATCTAGTGCCTATGTTAGCATTGTGTTGATGTCTA |
| | | | | GGAATGAAATGTTGTTATCGTCTAGTATTGATTATGATT |
| | | | | TGTTATCAATATGCTGAATGAATTTGATTATTGATATAA |
| | | | | TGTTTGGCATTACGCATTTTCAAAGTGCGAGGATTAAGT |
| | | | | ATGATTTGTCGAGACGTAGGAAGCAATCCCTATAAGAGA |
| | | | | TTATTGCTTTCTATAAATGATAGGTATTGTTAACTCTTC |
| | | | | CTGATGTTTTCTCTCATTTCTCTAAAAATGTAGATTTGA |
| | | | | TTCATATGTTAGAATTAGTGATGGTCATAGGGCGGGTTG |
| | | | | GGGTGGGTAGGCACTCCCCCGCGACCCGCCCTGCTAAAT |
| | | | | ACATATCCGCCCCGAAACTCAGCTCGCTTTGGGTTTTAA |
| | | | | AAACATGACTCATGACCCGTCCCACAACGGAATGGGTCG |
| | | | | ACCAGCGGGTCGCCCTGTTCACCAAGTTATTTATAAAAA |
| | | | | AAAATATATGCATACTTATATAAAATATTATAGGCTTAT |
| | | | | GTGCATGTATTTAATTCTATACATTTTAAATTATAATTA |
| | | | | AAGTTTGTAGTTAAATCTATTAAAATTTTATTTTTTAAA |
| | | | | CTATAAAGTACTAAACTATAATATTAAACTTATAAAAAA |
| | | | | ATAGATATATTATACTATAAATATGCGGGGCGGGTACGC |
| | | | | GTGGCAGGAATAACCATGACCTGTGACCCGCTCCGTCCC |
| | | | | GTTGCGGGTCAAAAATAACCGCCCCACTACCCACCCCAC |
| | | | | AACCCGTTTAGTTAACCTGTTTATAATCCATTCGGGTCG |
| | | | | AAAACCCTATAGGACGAGTAATTTTTTGCCCCATGACCA |
| | | | | TCCCTAGCTAGTTAGAACAATGTGTAGTTAGAGTAGGAT |
| | | | | CTCAGCAAGGAACGGAGACTCTTTTCACACATTTTTAAA |
| | | | | AAGTAATGATGGAAAACTAGATAAAGATCTCATACTCTT |
| | | | | TTTGCGAATTCACAAAAAGTAATAAACTAAACTCATAGC |
| | | | | AACAATTATTATCTTACATATAGATAATTCCTCGTATCT |
| | | | | TGTTCATTCGCAATAAATTATTTTAGTTTTAAAGATACA |
| | | | | TGCAACTAGAGTCACATGTATTCGACATATTTATAACCA |
| | | | | ACGATTTTTCGTTCTGAATTATCACTTTTGTAAGATACA |
| | | | | TTTGTCAACAATGTTGTACAAAATCGTTATATTGATCTA |
| | | | | TATGCACTTGTAAGTACACAACATGGACTAACATATGCA |
| | | | | TGTATATTATAAATATCAACTTGTACATATATGATATGG |
| | | | | TTGAACGTATATGCACTATACTTTTATGGCATGAAACTC |
| | | | | CTTGTTCTTTGGGACATGCACATCTTGTCTTTTATTTTC |
| | | | | TTAATATATATACTTTTCTTTTCTTAAGAAAAAAAATAA |
| | | | | ATCTAGAGCTTGTTGTGGTATACATTTGCGTTCTCTGTC |
| | | | | TTTCTTAAATATCTACTATACTAACGATCTATTGCTTGC |
| | | | | TTAGTGCGGCAAAAGGAACCTTTTTTTTTTCTTAATATA |
| | | | | TACTAAAATTTTTACTTCTCTTCTTAAATAAATAAATAA |
| | | | | TAATAAAAAACTTGTTGCTACATACATTTGCACCCTACC |
| | | | | TTTCTTCAATATCAGTTACACTTTCTACTCTTTTACTAA |
| | | | | ATAGCTAGGAAAAAAAAATCTACGGCACAAAGGACAATT |
| | | | | CTTACCTTTCACAAGGAAAAAAAAAAAATAAAAAAAAAT |
| | | | | CATGTTATTTAAAAGACACTTTCAAGTTTGGGTACAAAT |
| | | | | GGCGTCAACCTCGAACATTGTTTGAATCAGAATCGTTTC |
| | | | | AATTATATGTTCCTAGTCCCTAGAGTAAGAAGTCACTTT |
| | | | | TTGCTTAGCACGTGAGACTATCTTACAAGTGGACTACCC |
| | | | | CAACACTCCACATCCCCCTCCACCTCCGCCATCGCCTTC |
| | | | | TGTGCCTGTCTCTTCGCCTCCCTTGCCAACCCCGTGGCC |
| | | | | TCCTCGACCGAAACCGCGCGAGTAGCGGCTGCGAGCATT |
| | | | | AAGTTAGCTTTGTTGGCATTGCCCGCAGCTCTCTGAAAA |
| | | | | CTATATTCCATCATGGAGGCGCAAAGTTCCATCTCGGCT |
| | | | | TTTTCTTCTATGTATTGGGAGTGTTGAAACTCCTCCTTT |
| | | | | GCAGAGGTTGCTTCGGCTTTGTAACTAGGTAGTTTGGGC |
| | | | | TCGTAAAGTGCTTTGGCTTCCCGTAGACGAGACTCCGCT |
| | | | | TTTGCGATATAGAGAGAAGCCTCTTGTAGTTGCATTTTT |
| | | | | AAGGCTTTTCTTGGGTTTGTCTTTGCGAGGATGGAGATG |
| | | | | TAGGATTTTGTGAGACAGTGAGGAAGTTTTGCCCACCAT |
| | | | | GGCTTTGCTATTGTGCTCGGCATTGGTTTATTATTGATT |
| | | | | GATTATCTTTAATCAATCAATATAATATATT |
| 86 | Commelina | Genomic | 6205 | ATATATTAAGCGAAGACGTTTTTGATACTTCTTATCGCG |
| | diffusa | | | CCGCCTAAGCGCAACTTCATCAATCAAATATATATATTA |
| | | | | TTAAACTCAATTCCTAATATATCTCTAAATCCTATTTGT |
| | | | | GTATTTCTAGTTGCGGAGTTGTATTTGTACACTGAGTTT |
| | | | | GCAGTATACTTTTGTATTTTCCATCTCTGACTTCTAATC |
| | | | | GGAGACTGAGTGGTCAGCTAGGAAGTAATCATCATCAAT |
| | | | | TACAAATATCACATGCAATGTTTTTTGAAAAAATTCTTG |
| | | | | ACAAACATTTTCTTTTAGGGGGTTAATAATCTGTAAAAT |
| | | | | CTCATAGATAACTCTTCGGTGTTGTTTTATAATATGATG |
| | | | | ATACTCAAGGTGGTCATAATCTGAGGTGCTAAGTAGGAT |
| | | | | CGGCAAAGGGTCCAGAGAATTGAAATCATGGAGCTAGAT |
| | | | | AAGGATCGTAAAATTCTACAAAAATAATAAAATATAGTA |
| | | | | TAAATAAATTATAAAGAATATTTTATATGTAAAAATAAT |
| | | | | GTAAATATGTACACAATATTTTTTGTAAATTTATATATA |
| | | | | AGCAATTTCAACATAAGGATTAATATTTACATGACAAAA |
| | | | | TTATCGAATTTAATAATATAACACAATAAAAGTAAAATT |
| | | | | GTGAGTCCTTAATTAATTAACTTAAGCATTCTTATAAAT |
| | | | | GTAGATACTTTGTTTTGAAATTTATGTTGTTTAAATTAT |
| | | | | CTAATATAATAGATATTTTCAAAATAATTTTTGTTCATG |
| | | | | TCATGCATATAAATATTTTTATATTTTTTAAAAAAAGAA |
| | | | | TTCATGCACAAAATAGTCTAATAAATTATTATTTTCAAT |
| | | | | ATTATGGTGAGCATATTTTCTTTTGAGTTATTGTGGATT |
| | | | | TGTGGTGAGCAAATTATTATTAATTAGTTTCAAATTTTA |
| | | | | AAATATAATATGTATATGACATCTATTGCAACTAAACAT |
| | | | | GATTTTATAAATTAATACAAATAATTTTAGGTTAATTAT |
| | | | | TATTGACATCTTAATAATTTAATATATTGTTAAAATAAT |
| | | | | TTAATTTTATAATATATATTTTTAATATTGTGAAAAAGT |
| | | | | TTTTGTCATCTCTTTTTGAATTATAGATTTTTTAATTAC |
| | | | | ATATATACATTTTTAATTATCTATCAGTATATACGCAAT |
| | | | | AAATATCGATATATTTATTTTCATATCTATAAAATGCAT |
| | | | | ATCATAATTATTTATAGCAAAAATGATTTTAAAAATGAA |
| | | | | TATACAATTATCCTATAAATATTTTAGAAATTTTTAGCA |
| | | | | CACAATAATATATTTAATAAAATTTATCATCATATATTA |
| | | | | AATAAAATAATTACTATATTATATGAAAATGCAAATAAT |
| | | | | AATATTTAAAAATCTCTCATGTAATAGGAAAATAATATC |
| | | | | TATTATGTTAATCGAAATTTAGACAGTGAAGTATATCTA |
| | | | | ACCATTTATAATGGTAATTTACTTAGTTATATGATTATA |
| | | | | TAGTTTTTTAATACTAAGAAACGTATATAAAACCCTATG |
| | | | | AAGCATAAACATGATTTGAATCGATGGGGTCCCCCCATC |
| | | | | TTGTTTGTTTGTTTTTTTTTTTCCAATCATTGTTTTTAT |
| | | | | ATCCTAATATTCTTGATTTTTTTTTTTCCAAATATACTC |
| | | | | TATTAGTTTTTCCATCCAAAATGCTGTCATCACATTATT |
| | | | | TTATTAATATTTTATCAATAAAATATTGATATAAATAAA |
| | | | | TGAAATAAAAACACTTTATTTTTTATTTATTAAAATAAT |
| | | | | CATTTAAATTGTTTCTTACTAAAACCAAATAATTCTTAT |
| | | | | AAAGTATACATGATAAAAAGAACTAAAGTATAAATATTT |
| | | | | AAAAATAAAAATATAAAAGATATTTGAAGTTGTATATGT |
| | | | | ATCACAATTGTATAAATATTTTATGAAATTATATTTTAA |
| | | | | AACCAATATTTTAATATAATAATATTTTATTAAAAAATA |
| | | | | CAATAATTTTATAAGCATAATAATAATAATAATATTTTT |
| | | | | TTTTTTCTTCACATTTCTCTATTCATTGTAATAATGTAT |
| | | | | AATTAATATATTGTTTTTAGATGATACTATGGGTTGGTA |
| | | | | TTATTTTAATTTTAATTTTTTTTTTGAATAAAACTAGGT |
| | | | | GCATCTAGTGTGTTATTTCATTCAAAAATATGTAATCAT |
| | | | | GATTACACTAATCTTGAAGACTATCTCGTGAAGAGAGAA |
| | | | | CCCCACATGATAATCCCCCAAAAGAAAATTATATACAAA |
| | | | | AATGTGTAATAAAAAATATGTTATTTTAAATTTTTTGAA |
| | | | | AAAGGAAAAGTATAATTAACTTAATATGCAAAATAATTT |
| | | | | TTGTATACAATAGATGGTTATTATCGTTTAAATACATAT |
| | | | | GGAGTATAATGTCCATGTGAAGCATGGGCCATGTGCTAG |
| | | | | TTTGCTAAAAATATAAATATTTTGCTTTAGTTTTAACTA |
| | | | | TTTAATTCATTTTATTTATTACATTACTATTTAAATTGT |
| | | | | ATTATTGTTTTAAATTAATTGAACATCGTATAACTTTTT |
| | | | | TGAGTTCAAGAAAATTATAAAGAACAACTTAAAAACACA |
| | | | | ATTTTTTAAATTAATCTTTTATAATAAGACCATTTTAAA |
| | | | | TTTATACTATTATGTAAAATAGAGGATTCCCTAAATTTA |
| | | | | ATATATTATTTATTTAATAAATAATTTACATAGAAACTT |
| | | | | ATAAATAGACCTTAAAATTTATTTATTATATATATATGT |
| | | | | ATATATATAATCAGTTCCTATGATTCCTAAAAATTTATT |
| | | | | ACATTCAACAGTATTATATTTTTGATATTTTTTTTATTT |
| | | | | TTCCTAGATCAAAAGTATATTTTTTTAACTTACATAAAT |
| | | | | TTTCTTAAGATAGTTTCCCTTTATTTGAATCCTAATAAA |
| | | | | ATATTTTTTCTGATTAATTTATTAATAAAGATGATTAAA |
| | | | | AATATTTGATTATGATCCTTTTTTTTCCTTGATCAAAAG |
| | | | | TATGGTTTTTTTTTTTTTTTAACTATAGAATTTTAAGAT |
| | | | | AATTTTCCTTTATTTGAATCCTGATATAATTTTTCTAAT |
| | | | | TAATTTATTAATAAATATGATTAAAAATATTTGATTATG |
| | | | | GTGCAAATTTAAAATTTTAGGCCAATAAAAAATATTTTA |
| | | | | ATTAAATAATGATATATTTATATTTGGTATAAGATATTT |
| | | | | TTTTGTATAAAATATTTTTTTTACAAAATTAAATATTTT |
| | | | | CTATTTTATATTAATTTATTCTTTATTTTTTTAAATGTA |
| | | | | TTTTTATTCTTTTATTGTTGAATAAGAGTTATAACTTTA |
| | | | | TTGAACAACTTATATGATTTCAAAAGTATACATATTATT |
| | | | | CAACCTTTTGGGATTCACATGCCCAATCTCCCATGCTAT |
| | | | | TTTGCGATGTAAATATTTGCCGCTTAAGGTACGCATTTT |
| | | | | TGTTTGACTTCTCTCCACAACACATATTGCTACGAGGGA |
| | | | | TCAACTTAGAATAGACATGCATGTTGACTCACACTATGC |
| | | | | ATTCTGCGGAGCCGATAATTCGGCGGATCATCTTTTCCT |
| | | | | CTTGTATCCTATCGGAAGCTTGTTTTGATTTACATGTTA |
| | | | | CTCCTATTCGTGCTCGACCACAATTCAAGAGGTGTGGAT |
| | | | | TAGTGGACGTCGGTGTCAACGTGTCGCCTGGTCGGCATT |
| | | | | CTGCTGGACTCTTTGGAAGGCACGGAACCGCCTCATCTT |
| | | | | TGACCGTTATCCTCCTAAGTTGCGAGCTATTCAGTGGGT |
| | | | | GGTTCACTATCTTTTTGTGGATTGGACGTTGACCATTTA |
| | | | | CTGTTTTAGGTTGGTCTTGCTTTGTTCGCTCTGTAGATA |
| | | | | ATTATTCTGCTTTCTTTTTAGAGCCTGTGCACCAAACCT |
| | | | | CTTTTTGCAATGAAATGCTAGGTCTCCTAGTTTTCAAAA |
| | | | | AAAAAAAGTATATATATTTTAAATAAAATTAAATAAAAA |
| | | | | TATTTTCTTGACATTAAAATATTAATTTTTAATAGTAAT |
| | | | | ATAATGTGATAGATTTATAAAAATGTTTTAAATTTACTA |
| | | | | AATAGAGAAACTTGTTAAATATTTTTGGGTCATAAAAAT |
| | | | | TTAAAATAAAATAATTATAAAAACATAATTATGTTAAAT |
| | | | | TGTTTTTTTAAATATTATTATATTAAATACGATATATAA |
| | | | | TAATGTCATAAAGTTATACCATCACATATACACTAATAT |
| | | | | TTCAATAAAAAAATATGTGTATGATTTTTTTTTCCTTCA |
| | | | | TAATTTCTTTTACAGTGATATTTTTAATAAAAGTAATTA |
| | | | | AATAACAAGTTTGAGAGGTATGATGAGCTCCTGAGACAA |
| | | | | TATTATATTTTCTATATTTTCAATTTGTATATATATGTT |
| | | | | TTTATTTTATTTTTTTGAAATTATAAACATAGAATCTTA |
| | | | | TTATTTTTAATCATTCAATAAATTCTAAGTGGTTTATAT |
| | | | | TTAGTTCACTTTTTACTTATCATATTATTGTTAGGTTGC |
| | | | | TTTCTTTCTTTATGATAGCAATTTTTTTAATTTTTTTTT |
| | | | | TATATTAATGGTAAGATATGTTAAAATTAACACTTCATA |
| | | | | TATATATAATATATATATTAGAAAAAATTAACACTTCAT |
| | | | | ATTGACTCTTCATGTGTTGATTGATTACTATCCAATACT |
| | | | | TGCAATCTTAACGCTATTGTTAAAAATCGTAACGGAACT |
| | | | | ATGAAGCTTTGAACCAAACTACCTCCTCAGAGAAAGATT |
| | | | | GATACAATTCCGGTGGTTTACTTTTTTATTAAATTATAA |
| | | | | CATTGTAAGATGACTTGCTAATTACATACATTACATACA |
| | | | | ATTATAACATAAATATAGTGAATAATAATAGAAACTAAA |
| | | | | TAACCAACTAGGTAATAGCCTAGTTGGGATTTCGTCTCC |
| | | | | AAAAGAGATGGAGGGGCCAGGTTTTGAGCCATGGTGACT |
| | | | | GCGCTTGTCGCAAATTTTCCAAAGAAAAAGAGCATAAAT |
| | | | | GCCATAGAATTATGACATAAACTACAATTTTTAATAATT |
| | | | | CGAACAACAGTACTTAATAATATGCCATAATATTATGAC |
| | | | | ACAAATTACAGCAATTAATAATTCGAACAACTACAAACT |
| | | | | GCAGTACTTAATAATTCGAATAACCACAATACTTAATAA |
| | | | | TTCGAACAAAACAACATAATTATATTAATGCATCACGTG |
| | | | | TTTGCATGAAATTATGACATCATATATATATACACTAAT |
| | | | | TCTTAACCTTACAATTTTTATTTTTTTTTTGAATTATGA |
| | | | | CATAAACTATTATATACACTAATTCTTAACCTTAAAAAA |
| | | | | AAACTATGACAACATGTATATATATATGCTAATTCTTAA |
| | | | | CCTTACAAAAATAAATAAATCTTGAATTATGACATAAAC |
| | | | | TATAGTACTTAATAATTTGAACAAAACAACATAATTACA |
| | | | | TTAATACATCACATGCTTGCATGCAATTATGACATATAT |
| | | | | ATATACATACACACACAAACACACTAATTCTTAACCTTA |
| | | | | AAAAAAATAAAAAATCTTGATCTATTGAAAGCAACAAAA |
| | | | | TAGCATATTAACTTTGGTATAGTACACAAAATTATGACA |
| | | | | TAAAATATTAACTTTGCTGTAAGGCTTTTAAAAAATAAC |
| | | | | TTCTCTATCCCAATTTAATAATAATGATAATGATAATGA |
| | | | | TAATGATAATAATAATAATAATAATAATAGTAGGAGCAG |
| | | | | CAGCAGGATTAGATCTAGATTCTTTTATGACTTCACCAT |
| | | | | ACAGTGATTTTACATTATGAATAATAGGATTTGATTCTC |
| | | | | TTAACTTAATAATAATATTAATAAGAATTAGATCTAGAT |
| | | | | TCTTTTATGACTTCACCGTACAGTGATTTGATTTTACAT |
| | | | | TATGAATAATAGGATTAGATTCTCTTAACTATAATAATA |
| | | | | ATAATAATATATTTGGTAATGCGACTTTATAGAAAGGAC |
| | | | | CCGAATTTAATTCGGAGTTCCGTATAGTTAAACTGTGTC |
| | | | | TCTCACTAATAGTAAATATATATATATTTGCATTCTCAC |
| | | | | TGGTCTCTCAAACATCAATGGCCAAAACCCAACACTTCC |
| | | | | ACTCATCCTCGCCGGCGGCGATGGCCGGAGCATCCCCTG |
| | | | | AGGTCGTTCTCCAGCCCATTCGGCAGATATCCGGGACGG |
| | | | | CGAAGCTCCCCGGATCGAAGTCTCTGTCGCAGAGGATAC |
| | | | | TGCTCCTTGCTGCGCTCTCTGAGGTGAGGATTGTTCGTT |
| | | | | TTATGGTAAAAATGAATTCTTAGTAGTTTTGCTAATGTA |
| | | | | ATTGAGCTGCATTGATATGAATGCATATACTTGGTAACC |
| | | | | TAGTGTTAGTTTTCCAAGAATGTTGGAGATAGTTTGACT |
| | | | | TTTTTTTTAATACAGAAATTTTATTATATTATTATATAA |
| | | | | GGGTGTTACTACTACTACTACTACTTCTACTACTACTAC |
| | | | | TACT |
| 87 | Commelina | Genomic | 818 | CTTAAAAGCCTAAAATCCACCTAACTTTTTCAGCCAACA |
| | diffusa | | | AACAACGCCAAATTCAGAGGAAGAATAATGGCTCAAGCT |
| | | | | ACTACCATCAACAATGGTGTCCATACTGGTCAATTGCAC |
| | | | | CATACTTTACCCAAAACCCAGTTACCCAAATCTTCAAAA |
| | | | | ACTCTTAATTTNNNNNNNNNNNNNNNNNNNNNNNNNNNN |
| | | | | GGATCAAACTTGAGAATTTCTCCAAAGTTCATGTCTTTA |
| | | | | ACCAATAAAAGAGTTGGTGGGCAATCATCAATTGTTCCC |
| | | | | AAGATTCAAGCTTCTGTTGCTGCTGCAGCTGAGAAACCT |
| | | | | TCATCTGTCCCAGAAATTGTGTTACAACCCATCAAAGAG |
| | | | | ATCTCTGGTACTGTTCAATTGCCTGGGTCAAAGTCTTTA |
| | | | | TCCAATCGAATCCTTCTTTTAGCTGCTTTGTCTGAGGTA |
| | | | | TTTATTTCTCAACTGCGAAAACAATCTCTATTTGATATT |
| | | | | GGAATTTATATTACATACTCCATCTTGTTGTAATTGCAT |
| | | | | TAGTACATACTTATGTTTTGACCTTTGTTCGTTTGTTTG |
| | | | | TTGAATTGGTAGTGTTGAGAATTTGAATCTAATTATTTG |
| | | | | TTTTTCCATGTGAATTTAATCTGATTAAATCCACTTCTT |
| | | | | ATTTATGTTAAGTTGCAATGATGTTTGCCAAACGGTTAT |
| | | | | CATTGAAGGATAAGTTCGCCTACTTTTGACCCTCCCAAC |
| | | | | TTCGCGTTGGTAGAGCCATTTTATGTTATTGGGGGAAAG |
| | | | | TAGAAAGATTTATTTGTTTTGCCATTCGAAATAGTAGCG |
| | | | | TTCGTGATTCTGATTTGGGTGTCTTTATAGATATGATA |
| 88 | Commelina | Genomic | 127 | TGATTAATTTGATGTATATATATAGTTGAAGAGTTGTAC |
| | diffusa | | | TTGTACGCTGAGTATGTATGTAGTATATTTGTACTCGGA |
| | | | | GACTAGCTAAGTTACCATGTAATTAATTATCCATCATCA |
| | | | | ATTACAAAAA |
| 89 | Digitaria | cDNA | 783 | ATTAATTCTTCGTCTTTTTGTCTGCAAATCACCAAGAAA |
| | sanguinalis | | | CATAATGGCAGTTCACATTAACAACATATCCAACTTTAC |
| | | | | TTCCAATCTCACCAATACCCACAATCCCAAACCCTTCCC |
| | | | | CAAATCATTACCATCATCTTTTGGATCCAAGTTCAAGAA |
| | | | | CCCCATGAATCTTGCTTCTGTTTCTTGCAACCAAAACTT |
| | | | | TCAAAAAGATCACTTTCTGTTACAGCTTCTGTTGCCACC |
| | | | | ACAGAGAAGTCCTCAGTGGAGGAGATTGTGTTGAAGCCC |
| | | | | ATTAAAGAGATTTCTGGAACTGTTAATTTACCTGGATCT |
| | | | | AAGTCTCTGTCTAATCGGATCCTTCTTTTAGCTGCTCTT |
| | | | | GCTGAGGGGACTACTGTTGTAGACAACTTATTGAACAGT |
| | | | | GACGATGTTCATTATATGCTTGGGGCATTGAGAGCTCTA |
| | | | | GGGTTGAATGTTGAGGAAAATGGTCAGATTAAAAGAGCA |
| | | | | ACTGTGGAAGGGTGTGGTGGTGTGTTTCCGGTGGGTAAA |
| | | | | GAAGCTAAGGATGAAATCAAACTATTTCTTGGAAATGCA |
| | | | | GGAACTGCTATGCGTCCGTTGACTGCTGCAGTTACTGCT |
| | | | | GCTGGTGGAAATTCAAGCTACATACTAGATGGTGTTCCC |
| | | | | CGAATGAGAGAGAGACCAATTGGTGATTTAGTCACAGGT |
| | | | | CTTAAACAACTCGGTGCAGATGTTGATTGCTTCCTTGGT |
| | | | | ACAAATTGCCCACCTGTTCGTGTAGCTGCCAATGGAGGC |
| | | | | CTTCCTGGTGGAAAGGTCAAACTGTCGGGATCTATTAGT |
| | | | | AGT |
| 90 | Digitaria | cDNA | 679 | GGATTGGAGGGCTACCTGGCGGCAAGGTTAAGCTGTCTG |
| | sanguinalis | | | GTTCAATCAGCAGTCAATACTTGAGTGCCTTGCTGATGG |
| | | | | CTGCTCCTTTAGCTCTTGGGGATGTGGAGATTGAGATCA |
| | | | | TTGATAAACTAATCTCCATTCCCTATGTCGAAATGACAT |
| | | | | TGAGATTGATGGAGCGTTTTGGCGTGAAAGCAGAGCACT |
| | | | | CTGATAGCTGGGACAGGTTCTACATCAAGGGAGGTCAAA |
| | | | | AATACAAGTCCCCTAAAAATGCATATGTGGAAGGAGATG |
| | | | | CCTCAAGTGCTAGCTATTTCTTGGCTGGTGCTGCAATTA |
| | | | | CTGGAGGGACTGTGACAGTTGAAGGGTGTGGCACCACCA |
| | | | | GTTTGCAGGGTGATGTGAAATTTGCTGAGGTTCTGGAGA |
| | | | | TGATGGGAGCGAAGGTTACATGGACTGAGACAAGTGTAA |
| | | | | CTGTTACTGGTCCACCGCGGGAGCCATTTGGGAGGAAAC |
| | | | | ACCTAAAACCCATTGACGTCAACATGAACAAAATGCCTG |
| | | | | ATGTCGCAATGACTCTTGCTGTGGTTGCCCTCTTTGCTG |
| | | | | ATGGCCCAACCGCAATCAGAGATGTGGCTTCCTGGAGAG |
| | | | | TGAAGGAGACTGAGAGGATGGTTGCAATCCGGACTGAGC |
| | | | | TAACTAAGCTTGGAGCATCAGTTGAGGAAGGTCCAGATT |
| | | | | ACTGCATCATCACGCC |
| 91 | Digitaria | cDNA | 638 | TGTAGAGGGTGATGCTTCAAGTGCAAGTTACTTCTTGGC |
| | sanguinalis | | | TGGAGCTGCTATAACTGGTGGCACTATCACTGTTGAAGG |
| | | | | TTGTGGAACAAGTAGTTTGCAGGGTGATGTGAAATTTGC |
| | | | | GGAGGTTCTTGGACAAATGGGGGCTGAAGTAACATGGAC |
| | | | | CGAAAACTCTGTTACAGTGAGGGGTCCACCGAGGGGTTC |
| | | | | TTCTGGAAGTAAACATTTGCGTGCTGTAGATGTTAACAT |
| | | | | GAACAAAATGCCCGATGTTGCCATGACTCTTGCCGTGGT |
| | | | | TGCTCTCTATGCAGATGGTCCTACAGCCATTAGAGATGT |
| | | | | TGCTAGCTGGAGAGTCAAAGAAACCGAAAGGATGATTGC |
| | | | | CATTTGCACAGAACTCAGAAAGTTGGGAGCGACAGTTGA |
| | | | | AGAAGGGCCTGACTACTGTGTGATCACTCCACCTGAGCG |
| | | | | GTTGAATGTGGCAGCAATAGACACATATGATGATCACAG |
| | | | | GATGGCCATGGCTTTCTCCCTTGCCGCTTGTGCAGATGT |
| | | | | TCCTGTCACCATCAAGGATCCTGCTTGCACTCGTAAGAC |
| | | | | GTTTCCCGATTACTTTGAAGTTCTTCAGAGATTCACCAA |
| | | | | GCATTGATGTTTTCAATAGAGTTTTTGTTTCATTTGTAA |
| | | | | GGTGCCAAATATGT |
| 92 | Digitaria | cDNA | 605 | CTTAGCTGGTGCTGCCATCACCGGTGGCACCGTTACGGT |
| | sanguinalis | | | GGAAGGTTGTGGGACAAGTAGTTTACAGGGGGATGTAAA |
| | | | | GTTTGCTGAGGTCCTTGGACATATGGGCGCAGAAGTAAC |
| | | | | CTGGACAGAGAACTCAGTGACAGTGAAGGGCCCACCAAG |
| | | | | AAACGCTTCCGGAAGGGGGCACTTGCGTCCAGTCGATGT |
| | | | | TAACATGAACAAAATGCCCGATGTTGCCATGACTCTTGC |
| | | | | CGTGGTTGCTCTCTATGCAGATGGTCCTACAGCCATTAG |
| | | | | AGATGTTGCTAGCTGGAGAGTCAAAGAAACCGAAAGGAT |
| | | | | GATTGCCATTTGCACAGAACTCAGAAAGTTGGGAGCGAC |
| | | | | AGTTGAAGAAGGGCCTGACTACTGTGTGATCACTCCACC |
| | | | | TGAGCGGTTGAATGTGGCAGCAATAGACACATATGATGA |
| | | | | TCACAGGATGGCCATGGCTTTCTCCCTTGCCGCTTGTGC |
| | | | | AGATGTTCCTGTCACCATCAAGGATCCTGCTTGCACTCG |
| | | | | TAAGACGTTTCCCGATTACTTTGAAGTTCTTCAGAGATT |
| | | | | CACCAAGCATTGATGTTTTCAATAGAGTTTTTGTTTCAT |
| | | | | TTGTAAGGTGCCAAATATGT |
| 93 | Digitaria | cDNA | 605 | CTTAGCTGGTGCTGCCATCACCGGTGGCACCGTTACGGT |
| | sanguinalis | | | GGAAGGTTGTGGGACAAGTAGTTTACAGGGGGATGTAAA |
| | | | | GTTTGCTGAGGTCCTTGGACATATGGGCGCAGAAGTAAC |
| | | | | CTGGACAGAGAACTCAGTGACAGTGAAGGGCCCACCAAG |
| | | | | AAACGCTTCCGGAAGGGGGCACTTGCGTCCAGTCGATGT |
| | | | | TAACATGAACAAAATGCCCGATGTTGCCATGACTCTTGC |
| | | | | CGTCGTTGCTCTCTATGCAGATGGTCCTACAGCCATTAG |
| | | | | AGATGTTGCTAGCTGGAGAGTCAAAGAAACCGAAAGGAT |
| | | | | GATTGCCATTTGCACAGAACTCAGAAAGTTGGGAGCGAC |
| | | | | AGTTGAAGAAGGGCCTGACTACTGTGTGATCACTCCACC |
| | | | | TGAGCGGTTGAATGTGGCAGCAATAGACACATATGATGA |
| | | | | TCACAGGATGGCCATGGCTTTCTCCCTTGCCGCTTGTGC |
| | | | | AGATGTTCCTGTCACCATCAAGGATCCTGCTTGCACTCG |
| | | | | TAAGACGTTTCCCGATTACTTTGAAGTTCTTCAGAGATT |
| | | | | CACCAAGCATTGATGTTTTCAATAGAGTTTTTGTTTCAT |
| | | | | TTGTAAGGTGCCAAATATGT |
| 94 | Digitaria | cDNA | 510 | TGTAGAGGGTGATGCTTCAAGTGCAAGTTACTTCTTGGC |
| | sanguinalis | | | TGGAGCTGCTATAACTGGTGGCACTATCACTGTTGAAGG |
| | | | | TTGTGGAACAAGTAGTTTGCAGGGTGATGTGAAATTTGC |
| | | | | GGAGGTTCTTGGACAAATGGGGGCTGAAGTAACATGGAC |
| | | | | CGAAAACTCTGTTACAGTGAGGGGTCCACCGAGGGGTTC |
| | | | | TTCTGGAAGTAAACATTTGCGTGCTGTAGATGTTAACAT |
| | | | | GAACAAAATGCCCGATGTTGCCATGACTCTTGCCGTCGT |
| | | | | TGCTCTCTATGCAGATGGTCCTACAGCCATTAGAGATGT |
| | | | | TGCTAGCTGGAGAGTCAAAGAAACCGAAAGGATGATTGC |
| | | | | CATTTGCACAGAACTCAGAAAGTTGGGAGCAACTGTCGA |
| | | | | AGAAGGGCCAGATTATTGTGTTATCACTCCGCCAGAGAA |
| | | | | GTTGAACGTGACAGCCATCGACACATATGATGATCACAG |
| | | | | AATGGCCATGGCATTCTCCCTTGCTGCATGCGCAGACGT |
| | | | | TCC |
| 95 | Digitaria | cDNA | 510 | TGTAGAGGGTGATGCTTCAAGTGCAAGTTACTTCTTGGC |
| | sanguinalis | | | TGGAGCTGCTATAACTGGTGGCACTATCACTGTTGAAGG |
| | | | | TTGTGGAACAAGTAGTTTGCAGGGTGATGTGAAATTTGC |
| | | | | GGAGGTTCTTGGACAAATGGGGGCTGAAGTAACATGGAC |
| | | | | CGAAAACTCTGTTACAGTGAGGGGTCCACCGAGGGGTTC |
| | | | | TTCTGGAAGTAAACATTTGCGTGCTGTAGATGTTAACAT |
| | | | | GAACAAAATGCCCGATGTTGCCATGACTCTTGCCGTGGT |
| | | | | TGCTCTCTATGCAGATGGTCCTACAGCCATTAGAGATGT |
| | | | | TGCTAGCTGGAGAGTCAAAGAAACCGAAAGGATGATTGC |
| | | | | CATTTGCACAGAACTCAGAAAGTTGGGAGCAACTGTCGA |
| | | | | AGAAGGGCCAGATTATTGTGTTATCACTCCGCCAGAGAA |
| | | | | GTTGAACGTGACAGCCATCGACACATATGATGATCACAG |
| | | | | AATGGCCATGGCATTCTCCCTTGCTGCATGCGCAGACGT |
| | | | | TCC |
| 96 | Digitaria | cDNA | 477 | CTTAGCTGGTGCTGCCATCACCGGTGGCACCGTTACGGT |
| | sanguinalis | | | GGAAGGTTGTGGGACAAGTAGTTTACAGGGGGATGTAAA |
| | | | | GTTTGCTGAGGTCCTTGGACATATGGGCGCAGAAGTAAC |
| | | | | CTGGACAGAGAACTCAGTGACAGTGAAGGGCCCACCAAG |
| | | | | AAACGCTTCCGGAAGGGGGCACTTGCGTCCAGTCGATGT |
| | | | | TAACATGAACAAAATGCCCGATGTTGCCATGACTCTTGC |
| | | | | CGTCGTTGCTCTCTATGCAGATGGTCCTACAGCCATTAG |
| | | | | AGATGTTGCTAGCTGGAGAGTCAAAGAAACCGAAAGGAT |
| | | | | GATTGCCATTTGCACAGAACTCAGAAAGTTGGGAGCAAC |
| | | | | TGTCGAAGAAGGGCCAGATTATTGTGTTATCACTCCGCC |
| | | | | AGAGAAGTTGAACGTGACAGCCATCGACACATATGATGA |
| | | | | TCACAGAATGGCCATGGCATTCTCCCTTGCTGCATGCGC |
| | | | | AGACGTTCC |
| 97 | Kochia | cDNAContig | 1548 | ATGGCTCAAGCTACCACCTTTAACAATGGTGTCAAAAAT |
| | scoparia | | | GGTCATCAATTATGCGCCAATTTACCAAAAACCCACTTG |
| | | | | CCCAAATCTCAAAAAGCTGTCAAATTTGGATCAAACTTG |
| | | | | AGATTTTCTCCAAAGTTGAAGTCTTTCAACAATGAAAGA |
| | | | | GTTTCTGGGAAATCATCAGTTGTTTTTAAGGTTCATGCT |
| | | | | TCAGTTGCTGCTGCTCCCTCAACTTCCCCAGAAATTGTG |
| | | | | TTGCAACCCATTAAGGAGATTTCTGGCACTGTTCAATTG |
| | | | | CCTGGTTCTAAGTCTTTATCTAATCGAATTCTTCTTTTA |
| | | | | GCTGCTCTTTCTGAGGGTACAACAGTACTTGACAACTTG |
| | | | | CTATATAGTGATGATATTCGCTATATGTTGGATGCTCTA |
| | | | | AGAACTCTTGGGCTCAACGTAGAGGATGATAATAAGGCC |
| | | | | AAAAGGGCAATCGTGGAGGGTTGTGGCGGTCTATTTCCT |
| | | | | GCTGGTAAAGAGAATAGGAGTGAGATTGAACTTTTCCTT |
| | | | | GGAAACGCGGGAACGGCAATGCGCCCATTGACAGCTGCA |
| | | | | GTTGCCGTTGCTGGAGGAAATTCCAGTTATGTACTTGAT |
| | | | | GGAGTGCCAAGAATGAGGGAGCGACCCATTGGGGATCTG |
| | | | | GTAGCTGGTCTGAAGCAACTGGGTGCAGATGTTGACTGT |
| | | | | TTTCTTGGCACAAATTGTCCTCCTGTAAGAGTAAATGCT |
| | | | | AAAGGAGGTCTTCCAGGGGGCAAGGTCAAGCTCTCAGGA |
| | | | | TCAGTTAGTAGCCAATATCTTACTGCGCTACTCATGGCT |
| | | | | ACCCCTTTGGCTCTTGGAGATGTGGAGGTTGAAATCATT |
| | | | | GATAAATTGATTTCTGTCCCTTACGTAGAGATGACAATA |
| | | | | AAGTTAATGGAACGGTTTGGAGTGTCAATAGAGCATACT |
| | | | | GCTAGCTGGGACAGGTTTTTGATCCGAGGTGGTCAGAAG |
| | | | | TACAAATCTCCTGGAAATGCATTTGTTGAGGGTGATGCT |
| | | | | TCAAGTGCCAGTTACTTCTTAGCAGGGGCCGCGATCACT |
| | | | | GGTGGGACTGTGACTGTTGAGGGTTGTGGAACAAGCAGT |
| | | | | TTGCAGGGTGATGTTAAATTCGCGGAGGTTCTTGAGAAG |
| | | | | ATGGGTTGCAAAGTTACATGGACAGAGACCAGTGTCACT |
| | | | | GTAACTGGACCGCCCAGGGACTCATCTGGAAGAAAACAT |
| | | | | TTGCGTGCCATCGATGTTAACATGAACAAAATGCCAGAT |
| | | | | GTTGCGATGACTCTTGCTGTTGTTGCCCTATATGCAGAT |
| | | | | GGGCCCACAGCTATCAGAGACGTTGCTAGCTGGAGAGTG |
| | | | | AAGGAAACAGAAAGGATGATTGCCATCTGTACAGAACTC |
| | | | | AGAAAGCTTGGAGCAACAGTTGAGGAAGGACCTGATTAC |
| | | | | TGTGTGATCACTCCACCAGAAAAACTAAACGTAACCGCC |
| | | | | ATCGACACATATGATGATCATCGAATGGCCATGGCATTC |
| | | | | TCTCTTGCTGCCTGTGCTGATGTTCCTGTCACTATTAAG |
| | | | | GACCCAGGCTGCACCCGCAAGACCTTCCCAGACTACTTT |
| | | | | GACGTCTTGGAACGGTTTGCCAAGCAT |
| 98 | Kochia | Genomic | 7037 | TTTTCATGAAATAAATCTTGATCCTTCATTCAAAATCCA |
| | scoparia | | | ACGATCAAAATTGCTTCTCACGTTTCTCATTTTAAGGGT |
| | | | | GCTTCTCATTTGATCCTAAATCTATATACATATGTAAGT |
| | | | | ACCTTGAATGCCATGGAATTGAAATTTTAAATTATGTGT |
| | | | | TGGTTGTGAATGGGGTTAATGAAGTAGATAGAGTAGGCT |
| | | | | GACAAATATTCCAAGGGGTACCTACAGCTACTCTTGGTC |
| | | | | ACTAAGTCATTGTTCTGTTTTTAGATTTTAATTGCTTTC |
| | | | | CCTTATGGTTTTTTCAGTTATGTACTTGATGGAGTGCCA |
| | | | | AGAATGAGGGAGCGACCCATTGGGGATCTGGTAGCTGGT |
| | | | | CTGAAGCAACTGGGTGCAGATGTTGACTGTTTTCTTGGC |
| | | | | ACAAATTGTCCTCCTGTAAGAGTAAATGCTAAAGGAGGT |
| | | | | CTTCCAGGGGGCAAGGTAGAGTAAATTTCTTGTAGATTA |
| | | | | ACTTTGTTGATAATTCACTCATTAATATATCAATGAGAC |
| | | | | ATCCTCAAAAAATAACTCTGTCCTGTTTTCCTGTCATTA |
| | | | | AGCTCTGTTACATAACTTACATTATTTTAAAGCATTTTG |
| | | | | ATGGAATGTATCTGCAGGTCAAGCTCTCAGGATCAGTTA |
| | | | | GTAGCCAATATCTTACTGCGCTACTCATGGCTACCCCTT |
| | | | | TGGCTCTTGGAGATGTGGAGGTTGAAATCATTGATAAAT |
| | | | | TGATTTCTGTCCCTTACGTAGAGATGACAATAAAGTTAA |
| | | | | TGGAACGGTTTGGAGTGTCAATAGAGCATACTGCTAGCT |
| | | | | GGGACAGGTTTTTGATCCGAGGTGGTCAGAAGTACAAGT |
| | | | | AAGTCACTCTTCTTTTACTTGCATGTATTGAACGTCATT |
| | | | | CCATTGGTAGACTGATGCAGCATTAATAATATGTCAGAT |
| | | | | CTCCTGGAAATGCATTTGTTGAGGGTGATGCTTCAAGTG |
| | | | | CCAGTTACTTCTTAGCAGGGGCCGCGATCACTGGTGGGA |
| | | | | CTGTGACTGTTGAGGGTTGTGGAACAAGCAGTTTGCAGG |
| | | | | TATGATCCAAAGCCTCACTTCAATAAATTTTCAAGTACA |
| | | | | CATTCGTTTTACTTCCTCCGTTTTGTATTACTCGCACCG |
| | | | | GTTTCCATTTTGGGAAATTTGCGAATACTTGCACCACTT |
| | | | | TGCTTTATTCCCTTTTTTGGCAATTTATTTTGTTTGAAA |
| | | | | TGACCATTTTAGCCTTATTGTTTTTCCCCACATGGTGGG |
| | | | | ATCAAAGGAATTAACACCATAAAACACACCTCCTTTATA |
| | | | | CCCCACCAACTTAATCACACTACCCTTCCCTCAACTAAT |
| | | | | TATACCAACAAAAAAACGCCTTGGAGTCCGCAATAATGA |
| | | | | AAGTGGTGCGAGTAATATAAAACGGAGGAAGTATTTATT |
| | | | | TTTTAGATTAACTGTTGTAACCATTTTTTGGTTAATTTT |
| | | | | GAGGCTAAAGTATGGCCTTTTGACAATTAACTTTCAATA |
| | | | | TTAATCTCTAATGTGGTGTAAAGTCATCCATTTTAATAT |
| | | | | CAGACAATTGTGTTTGACTCCCAAAAAAGGATAATTTAC |
| | | | | TTCTTATTGTTTTGTGACTGCCAAAAAGGATCACTTGAA |
| | | | | TGTCATGGATTGTTTAATCACCTATTTAGGCATTGTTGT |
| | | | | GTTGTGATTCACCTCATCTTTAGGTCCAATAGATTTTGG |
| | | | | CTGAATCTTACTTGTGACTGCCAAAAAGGATCACTGACA |
| | | | | ATTTACTTGTTTAACGGATTTTACTCAGGGTGATGTTAA |
| | | | | ATTCGCGGAGGTTCTTGAGAAGATGGGTTGCAAAGTTAC |
| | | | | ATGGACAGAGACCAGTGTCACTGTAACTGGACCGCCCAG |
| | | | | GGACTCATCTGGAAGAAAACATTTGCGTGCCATCGATGT |
| | | | | TAACATGAACAAAATGCCAGATGTTGCGATGACTCTTGC |
| | | | | TGTTGTTGCCCTATATGCAGATGGGCCCACAGCTATCAG |
| | | | | AGACGGTATTAACTCCTTTCTGATACATTACACTTTTCT |
| | | | | TGTGCTATATATTGTTTCAAATTTGATAATTCGATCATG |
| | | | | CTTCAAATTTTGCACACAGCCGTAATCCATGGTTATAAA |
| | | | | ATGACTATGACACTTGTCTTGTTACTGAAAAGTGCATAC |
| | | | | AGTAACAAAGCTGATGTTACTTCTTAGTTTACTCTAATA |
| | | | | ATGGTTGGACGGTCACTGGCGCACATCCCCATGGTTGGA |
| | | | | AGTTGTGAATATTGTTGTCATAATGGCTTATGGAGCATC |
| | | | | TTTTGGTACACTTCAGGAGTAAAAGACCACTAGTCCAGT |
| | | | | ATAGGGTTAATCACCTCTAGAACTAGTTAGTCACATATA |
| | | | | CTCGGAAAATTATTCATATTTTGTGGTTACATGCGTTCG |
| | | | | TTTATCTGCATCTTGCCTAGTGTCTCCTCTTGAAATCAT |
| | | | | TCATATATGTTCTTTTTTTTCCCCTTCATCTGTTACATG |
| | | | | TTCAAAATATGCTTACAACGAAATTGGGTAACTTGACCA |
| | | | | GTTGCTAGCTGGAGAGTGAAGGAAACAGAAAGGATGATT |
| | | | | GCCATCTGTACAGAACTCAGAAAGGTTAGCCACATTCTT |
| | | | | TAATCTTGTAGTAAAAAATAAAGTTGCCTGTTTCATGTA |
| | | | | AGTTGATGTTAATTCGGACTTTTAAAATTTTCAGCTTGG |
| | | | | AGCAACAGTTGAGGAAGGACCTGATTACTGTGTGATCAC |
| | | | | TCCACCAGAAAAACTAAACGTAACCGCCATCGACACATA |
| | | | | TGATGATCATCGAATGGCCATGGCATTCTCTCTTGCTGC |
| | | | | CTGTGCTGATGTTCCTGTCACTATTAAGGACCCAGGCTG |
| | | | | CACCCGCAAGACCTTCCCAGACTACTTTGACGTCTTGGA |
| | | | | ACGGTTTGCCAAGCATTGAGCGGCTATCTGCAGATTTTT |
| | | | | CATAAAGTATGCACGAAAGTTTCAATTTAAGAAGATACC |
| | | | | GAGTTGATTATATGCTTTCCGCATAAGTTATTGTCACAT |
| | | | | TTTTTGTATTATGTTTGTAAGATCTTAGGCAATAAGATA |
| | | | | TACTGTTAGAAATTATGTGTATCTGATTATTTAGAGATG |
| | | | | TATACTTGGGTCAGTTGAAATTGTACGAGAAAGGTCTGG |
| | | | | ATTTCGAAAAAAATGTGATCCAGACATTAGTGTGGTCTG |
| | | | | AACTGAAGCAAGTACTCCCTCCGTCTCATAATTCTCACA |
| | | | | ACTCTTGCTATTATTTGTGAGAAATAAAATATTCAAGTG |
| | | | | TTGCGAGAATTGTGTGACAGCGGGAGTAGCAACTTTTCA |
| | | | | AGTTTGGAATTAATTTTGTGATGTGAGTTTTTTGTGTAT |
| | | | | TCTTTGTTTTCCATCAAACCCTCCTCCAAAGTACAAACC |
| | | | | CAATTCATGGTATGGTTGATGCAACAGCAATATGTCAAA |
| | | | | ATCAGTGTTTGTGATGTTGGCTTCTCTACTTCATTATCT |
| | | | | CTTCTTGTTCAGTATGATTTCGCAATCTCTTCCCGTCAA |
| | | | | AATCCCTTCTCTGATAAACGCGGAAATCGTGTCTTCCCC |
| | | | | TCAGTGTGTATCCACCTCTTAAAAATTTGTTGAGAGTTG |
| | | | | AAATGTGCTGCCACTGGATTCATCCTTTAGGGCGAATTT |
| | | | | TGAACGGATTTTAGGTGGTTAGGATTCAATCCCTGTCAA |
| | | | | TTATTGTTACGGGAATTAGACACGCGTTCTGCCTTACCA |
| | | | | ACCCCATTTTTTTTGTCACTATATCAAGTATCCATTGCT |
| | | | | AGTTGTAGTCATGTAGTAGGGTCTGAAATCTAAAGCTAA |
| | | | | GTAGCAAGATTGCAACAACAGGAACAGCAAATAAATCTA |
| | | | | GACTTTTGAGGTTTGTTTTTTTTTTTTTTTTTTTTGACT |
| | | | | TTTGAGCTTAGTTTGTCATATTGGTTAAATAATAAGTTA |
| | | | | CTGTAAATAGATTCAGTTTTAATTTTGTTGTTAGTGTTA |
| | | | | GTGTGTTTGGCGGTGGTTGGTGGTTTATCTATCTTTTCC |
| | | | | ATTACTAGTGTCATAATTCAGAGAAGATCTACTTTGTTG |
| | | | | ATGATAATCTGTGTAGTATTGAATCAGACATCAAATCAA |
| | | | | TTCGTAGAATTTGTTGAATCTAGTATTAGCAAGGTCCCC |
| | | | | TTGTAGACGGCTGCAGATGACAGCGATTCATGAGACGAG |
| | | | | AGTATTTTTTAATGTCAGATTTTACAAGCGATTATAGTG |
| | | | | ATGTTGAATTAGAATTATTATTAGGTTCAATTTTCATTA |
| | | | | TCTTTGTTATTTTTTTTATCTCTGTTGTAAATGTCGTAT |
| | | | | GACTTGTTATTTTTTATCTCTGTCGTAAATAGTTACTTT |
| | | | | TCCCCTAGAAAAAAGTCAGAACTGACATACGACTACCAC |
| | | | | TTCAGTTCGTAATTTATAATTATAATTATTATTATTCTC |
| | | | | CCTTGTTTTACTTTAGACAAAAACAGTAATTGCAAATAA |
| | | | | TAATTTATCATGAATCATGATGAAAAATTGAAAATGGAA |
| | | | | TAGAAGAAGTGAAGAACTGCCTTAGTTTAAAAAAAAACG |
| | | | | AAGATTAGATAGAATTACACTGAAGGTAAGAATATAGTG |
| | | | | AGAGTCTAATTAGTGGTTAATTAACTATCTAGGCTTAAT |
| | | | | TCTCAATCACTTTTTTAAAAACTTGTGCTATCACTTTTG |
| | | | | CCCTTCAATTAGGGTTCATTAGTGGGGTTAAATAATGCA |
| | | | | CAATAGGGTTTGCATTATATGACAACATTAGAGTGAGGG |
| | | | | ATAACTCAAGTGGTTAAAACTCTTCTCTCGATTTCAGAA |
| | | | | TATTCTGAGATCGATTCTCATTTCCATTCTAGTGGCTCT |
| | | | | CTTAACACCAAAAAAAAATAAAAAATAAAAAATTAGTGG |
| | | | | GGTTAAATAATGCACAATAGGGTTTGCATTATATGACAA |
| | | | | CATTAACTTGTTAACTAAACGAACACATACATGTGTAAA |
| | | | | TAAAACGATAAGAAAGTTGTTCTATACTTATTCAAAGGT |
| | | | | CTCGAGTTCGAGCCCTGAGAATGAAGAAGCATGTGTTAA |
| | | | | AAGAACTAATTTCACAATTGTGACTTAACTCGATTCGAA |
| | | | | TCCAAATTAATCAAATCCTAACGGATTTCGAATATTGAA |
| | | | | TACGCTTGTGTAAAACATAACATTTATGAACTTGTTAAG |
| | | | | TAGTTTAATGGAGTAGTTAATAATCCTTTATAACATAGG |
| | | | | TATTATTAAAGTGATAAAGTAAACAAGATTGTAAGACGA |
| | | | | CAATAAGACCAATCAAAGTTGGGGTCAAATGATTGAATA |
| | | | | AAATGAAATAATTTTTTTAAAAAAAATAGAGAAAAGATT |
| | | | | ATGTGATAATATAATTACAAATTATTACATTATCACCGC |
| | | | | CAAAACTTATTGTAGCATGTGAGAATGTGATTATTAAAT |
| | | | | TAAAAAAAGGCAAAGTTGGAAGTTAAACATGTCATCTTT |
| | | | | CTTCCTTTGTAGTCTGCCCTAAGCTTAACCATGTTGTCT |
| | | | | CCCCTTTTTAAAAAAATAAATTAAAAGTTGCATTATTGA |
| | | | | TTATTAAGTTTACAAATTATATCCTATGATAAATTGCTA |
| | | | | ATTGAACCATACCTAATAAGCCTAAGCTATTAGATCTAT |
| | | | | CACTTATATATATAGTTGCACACATTCGTACCCCTTAGG |
| | | | | TCCTTACTAAATCAATTTCGATCTCGGTCATTTAATATT |
| | | | | GCTAACAACTATCTGTATAAGAATCTATTAAAATGTATA |
| | | | | AGCTCGATATTTTTCAAATGAAAACAAATACTTCGTAAT |
| | | | | TCATTTTTGTTCGGTTATCTTTAATTGTCCACAAGGTGG |
| | | | | ATAATAATTAGCTTGGTAGTGCAATAATAAACAAGAATA |
| | | | | ATACTAGCTAGTGCAATAATAATACAAATGTGAAGATTA |
| | | | | TCAATAATAAACACAATTAATTGTAATTAACTCAAGATT |
| | | | | AGGTGAATTTTATGATGAGGAGTGTAGAGTAAAGAATGT |
| | | | | GGGGACATAACATAAGATTATTAAAGTAGATTATCCTAT |
| | | | | AACCTTTTCTCCACATCTCTACTTATCTCTTAGTATTAA |
| | | | | ATTAGAAAGACTTGAAGCTTAAGAATCAAGGTAATATAC |
| | | | | ATGGTATATCTAGCTTGTTTGTTGAAGCAATTTTGTAGG |
| | | | | GCACTTCAACTTTATTTTTTTTATTTTTTTTAATTAAAT |
| | | | | AGTGACAATATATTTAATTTTGATCATTTTTATTTATCT |
| | | | | TGTATGCTAGTAAATTAAAGAATTAAACCTTGGTGTCAG |
| | | | | GAATAAATAAATAAATAATACTGACTTTCGATTAACGGA |
| | | | | ATAATAGAGAAAGTTACATAGGAGATCGAATTCAATTCA |
| | | | | CTTGTTTAAATCTTACCTATAGTTTATACCATGTATGTT |
| | | | | TTTACTACTTCATAAATAAAATTTAGGACATGTTTGGCA |
| | | | | ATTGATTTAATACTAACGATTTTTTTTTATTTTTTTTAT |
| | | | | GACATTTCGTCATCAATTTGAAAAGGTGAATATCCATTA |
| | | | | TCCTAGGCAACACACTTTCGAACAGTCTACAAATAAACG |
| | | | | CAAATAAATCAAACCAGCGAATTGCGATTGAGTGCATAT |
| | | | | GTATGAGATGATGATCAATCATCGCATATTACTCCGAAT |
| | | | | AAAGCATTGATTGATTTGGAATGAAAGATATCCAAAGAA |
| | | | | TATTGAAGGAAAGATGCTAAATTGCTATGAATATATATA |
| | | | | CAATGAAGATTAGCTTGTTTATTATAGTATTCAGGATTA |
| | | | | GCTTGTTTATTATAGTATTCAGGATTGGAACCTAACCAC |
| | | | | CCAAAACGGATTCTCGAATCCGGATTAGTTCAATAGGTT |
| | | | | GAATTGGATGATACACCAAAAAAAAATTATAATATTCAA |
| | | | | GAGTTTGAATTAGCATGTGCAAGTAGCGCGATGACACAT |
| | | | | AGTCCAAAAATAAAAGGATCTGGTCCAAAATTTACTATA |
| | | | | TAACTTATTACATAATTAAAGATAAAATTTGTAACATAC |
| | | | | ATATACGGGACATATTTAAAAATTACACCAATCTTTAAA |
| | | | | ATCCTTGTAATATCGTAGCCACGACATTGTTTGTATTGT |
| | | | | AGTAGCACGTACACCTGCCCAACATAACATCGCTATTCT |
| | | | | ATTGAATTGAACACAAAAATGAAAAAAAGGACTTATTTC |
| | | | | ACATTCTCACAGCATTCACATAATCACATGTCTTTGTCT |
| | | | | CCCGTTCTATTGAATTTAACTCCACTCCTATATTAATTA |
| | | | | TTTCCCATACAATAATACAAACAAACAACTTACACATAA |
| | | | | AAATGAATAATAAAAGACAGTGAGAGATCAGGGCTGCCT |
| | | | | AGTCAATCCAGTGGATTAACAAAAATTGTCAATCTAATG |
| | | | | GCATTTTGGTAAATAAA |
| 99 | Kochia | Genomic | 5741 | ATTTTATTTACAATTTTGCCATTTATTTTTTTCTTTTTT |
| | scoparia | | | GGTTTTATTTACCAAAATGTCACTAGATTGACAACTTTT |
| | | | | ATCAATCCACTGGATTGACTAAGAATTTTTCGTGAGCGA |
| | | | | TAGTTCGGTAGATAGAAATTTTCTTTTGATCTCGAGAAA |
| | | | | TTTTAGGATCGATTTTCATTTTTGATCCACCCTTGTGAC |
| | | | | TCTTTAAAAATATATATTAAAAAAATGTATAATAACGCC |
| | | | | CACCTTATTTAGGAAAACAAAGTGGATCTTTTTCTGTTT |
| | | | | TATTTTAAACCGTGCCCTGTATCTGTGTGTGTGACCATT |
| | | | | ATTTGGCCTCAATTTTGAACTTCTCCGAGTAGTTGTTAA |
| | | | | TACTTAGCATTTGGGACCTGCAATGTTTAGGTTTTAGGA |
| | | | | TCTGCAATGTCCGGTGGTGGGGAAGCCTCATTGAATGGG |
| | | | | GAAAGATGTACTGGTAATGTAGATGGTCCTTACAGTGAC |
| | | | | TCTTCACCAAGGAATGATACAAACCCTAAGCCTTCTTGT |
| | | | | GATGCTAATGTTCCAACTGTATTAGATGGTCAAGTCGGT |
| | | | | GGTGCTTGTGATGATGTAGATGTTAATGAAATTGTTTTG |
| | | | | GAAGCAGTACCTCCTGTAGTCGGAATGAGTTTTAAAAGT |
| | | | | ATGCTTGAGGTTGATGTGTTTTACAAGAAGTATGCAAAG |
| | | | | AGTAAGGGGTTTGCTGTTGTGAGGGTTGGTGGATCGTCT |
| | | | | AATGTTGCTAAAGAAAGAATAAATCAGACATGGCGTTGT |
| | | | | GAGTGTTATGGCTCTCCTGATGCGAAGATTATTGCCAAG |
| | | | | TCAAAGAGATTTGCTAAGGATCCAGTATCGGAGAATTTA |
| | | | | AAGGATCAGGAACTGTGTAATCCACGTAGGCGCAAGTCT |
| | | | | AAAAAATGTAATTGCACAGCTAAGATTTATGCTAGTGTT |
| | | | | AATGAATGTAGACATTGGATTATACGTGAAGTAGTGCTT |
| | | | | GATCATTTGAATCATGATCCCAAACCTAAGGATGCCAAA |
| | | | | CTAGTGAAGGCATATAGGATGCAGGAGTTTACTTCTACG |
| | | | | GACCGTTCAAGAGTTATAAATGGTGCTGCAGCTGGTGGG |
| | | | | AAGGTGGGTGTTATGTATGGTTCAATGGCGAACGAAAGG |
| | | | | GGTGGTTATGAGAACATGCCCTTTACTCAATGTGACATG |
| | | | | AGGCATGTGCTTAATGAAGAACGTAGGAGAAAGATGAGT |
| | | | | GGTGGTGATTTTAATGCGTTGCTAGCTTATTTTGGGAAG |
| | | | | TTGCAGCGTGATAATTCTAACTTTTATCATGTTCACCGA |
| | | | | GTCGATTCTGGGGGAACAATCAAGGATGTTCTGTGGGTA |
| | | | | GATGCTCGTAGTATGGCCGCATATGAGGAGTTTTCTGAC |
| | | | | GTTGTGTGTTTTGACACCACGTACTTGACTAATCAATAT |
| | | | | TCTTTACCTTTTGCAAATTTCATTGGCGTTAACCATCAT |
| | | | | GGTCAAAGCATCCTTTTTGGGTGTGCTCTGATTTCCAAT |
| | | | | GAAGATAGCGAGACGTTTGAGTGGGTTTTTAGGGAGTGG |
| | | | | CTGTTATGCATGAAGGGAAAGGCTCCGGGTGGTATCTTA |
| | | | | ACCGATCAAGCCGCTGCAATGCGACGACCCTTGGAGAAA |
| | | | | GTCATGCCTGATACCAAACATCGTTGGTGTATTTGGCAT |
| | | | | ATTACCAAGAAACTGCCCTACAAGTTTGGATCTCGCAAG |
| | | | | TGGTATTATTTCGAACCCTAATCTTCCTTGTTTATTCTT |
| | | | | GTATTTGTGTTATTTTGCTGTTTAGTGTCTCCTTGATAA |
| | | | | GTGTCTTGTGACTCCTTGATTTTTTTCACTTGTGCTGAA |
| | | | | TATCTTAGTGAAATGCAATTGTTTAAATCTTAGTGAAAT |
| | | | | GCAATTCTTAGTGGAATATCTTAGTGAAATGCAATATCT |
| | | | | TAGTGAAATGCAATTCTTAGTGGAATATCTTAGTGAAAT |
| | | | | GCAATATCTTAGTGAAATGCAATTCTCTTAACATTCGAT |
| | | | | CAAATTGAAATGCAATTTTTTTGCTTGTTCTGGTGTTGT |
| | | | | TGAATGATTAATTTTCCGGTTTATGCTTGTGTCGTATCT |
| | | | | TTCATAAGTTGCAGCATATTATGGTAATATGTTTTAATT |
| | | | | TGTTAATATTTCCAAACTTGCACAGTTACAAGGAATTTA |
| | | | | AGAAGGAGTGGTTGAATGTTGTTTATAATAGTTTGAATG |
| | | | | AGGCCTCCTTCGAACGCCGTTGGAAGGAGGTTGTGAGTA |
| | | | | AGTATGGTTTGGAAAACGATGAGTGGTTGCAGAATCTAT |
| | | | | TTGCTGAGAAACACATGTGGGTGCCCTCGTTTATGACTG |
| | | | | ATCATTTTTGGGCGGGTATGCGTTCTACGCAAAGGGTGG |
| | | | | AGAGTATAAATAGTTTTTTTGACCAATTTGTTGATCGAA |
| | | | | ACACGTCCTTTGCTGAATTTGGAGAAAAGTACATTAATG |
| | | | | CGGTCGAGAAGAGGATTATGGAGGAGAATGAAGCTGACC |
| | | | | ATAAGGAGGTGAAGTTCTTTAGGAATTATTCTACTGGTT |
| | | | | TTAGTGTCGAGAGGTTTTTTAAGAAAATTTACACCTCAA |
| | | | | GTATGTTTAGGTCTATACAAAAGGAGTGTGAGAAACGAA |
| | | | | CCTATTGTATGATTGATGAGGTGAAGAGGTTGGATGACA |
| | | | | AAAATTTTGAGTATTTGATGGAGGATAGGGTGTGGATTA |
| | | | | AAAAGAAGAAGAGATATATTGAAATATTGACTGATGATC |
| | | | | GTACTCACTATACCGTGTCTTACAATTGTGAGACTAAGG |
| | | | | ATGGTATTTGTGAATGCAAAAAATTTGAGACTGACGGTA |
| | | | | TTATTTGTAGGCACTTGATAACTCTCTTTTATAAGGTCA |
| | | | | GGCTAGATGATATACCAGATAAGTACGTTCTTAGGCGTT |
| | | | | GGAGGAAAGATGTTGTGAGGAAGCACTCTAGTGTCACTG |
| | | | | TCTCCTTTCATGATTTGAGTCGAACAGAACAGGTTAAGA |
| | | | | GGCGTGATAGGTTGGTGGTGGTATTTGAGCCTCTTAGTC |
| | | | | AACTTGCTTCAAAGTCAGAAGTGTGTACTGTAATTATGC |
| | | | | TTAAAGGCATGGCTACAATTGAGGGTGAAATTACTAAAG |
| | | | | TGTTGTCTGAGGATAAGGTTGAAGAGGTTAATGAAGCTG |
| | | | | CTGCTGATGTTGAGATGCAATCAGGTGTAGGATGTGACA |
| | | | | CGGATGACAGCCTTGATGGCTCTGAGTCTGAAATGGGTG |
| | | | | GCCATAGCAATGGTGTTGAATCTCGAGCGAGTGAGGTAG |
| | | | | TAGGCTCATCTACAAGTACCCCTAGCAAAAGTGTAGGAA |
| | | | | TCAAGGATCCAGTTATTAAAAAGAAGCGCGGAAGGCCAG |
| | | | | TTGGTTCTAGGTTCAAGGCAATTTCAGAGACGGGTTGGT |
| | | | | CATTGAAATCAAAATCTCAAAGTGAATCATGCACCTGTC |
| | | | | AGTGCGATGCTCATAAGTGTGTGAGCTCTAAGAAGAAGG |
| | | | | GACGTGGGAAAGGCAAGTGTAACGAGAAGAAGGTGTCCC |
| | | | | AATCTGAGCACACACAGGTATGTTTTTGGTTTCGTGTCT |
| | | | | CATTTTAATCAAAGTGTCCCATTTAATTACAATATTAAC |
| | | | | TATGCTCTGTATGAGTTCATATTTAATGTAGTGTGTTTG |
| | | | | AACTTAGGATGATGGAGCTCAAGCCTGCAGCAATCCCGG |
| | | | | AGATGCCCCTCGTAAGGTGACTGGGATATTAGCTATTCA |
| | | | | TGTTCAGTGTTTTTCATTATTGGTGATTTGATACTTGAT |
| | | | | ATGCATGTTCATTCTTGAGCCGAAGAAGTCTCTTATTGG |
| | | | | TGCTTTGATACTTAATATGCATGTAAATTTGTTTTGATT |
| | | | | TCAATTGTTTGCAGTCGAAACGAATCAAAAAAGTTTCTT |
| | | | | TCGTTGATGAGGAATTGAATCCGGAAGGAGATACTCGTG |
| | | | | TAGGTGATGTTTTTAACAATGCCAATGAAAGTCAGGATT |
| | | | | ATGTTTCCTTAAGTTGACTCAACATTTAAATGTTAAAGG |
| | | | | TATTTTATTTTAAAATTTCCTCTACGGCGGCATAAATTT |
| | | | | TATTTACGAGCATTGCATCATTAGTATGGTTGACTAGAA |
| | | | | TGTTAGATACAATGAATGCTTTTGCGAAAAATGAAAAGA |
| | | | | AATGTTTCTGGGATCATGCTCATGACTTCACCCTTGTTT |
| | | | | GACAGGAAATGATGTTTGAATTGAAGATTGTTGGAACGA |
| | | | | TTTCAGCTGTGCAATCAGGGTGCTTCAAGTGATCCGCTT |
| | | | | CAAAAGATTAATGCTAATTGGAAACTAGTGAAAGACGAT |
| | | | | TATGCGTGTTTCCCTTTAATTATGTATTTGATTGATGCA |
| | | | | TTCTTTCATTAATTTGCTCACTGTGCAACCAGGAATTCT |
| | | | | ATCTTTTGGATTAGAGCTGCAATTTGAAACTTGAAAGAA |
| | | | | TTTGTAAACAGGATTCAAAAGTTCTCGCATTGCATATTA |
| | | | | CGCTATTCTTTTGTTGAGTTATACTTCATTATCCGTCAC |
| | | | | TATTGCCATTATAATACATAGAGATTTTTCTTGAACACA |
| | | | | ATAATCATGTGTTTTGTTGCACGATATTACTAATTACTG |
| | | | | TTTGATGATTTTTAAACCATTAACTTCATATTGTAACTT |
| | | | | TCATTTAATGCTACAGATTTTTATCTAAAATTAAAAAAA |
| | | | | GGGCACCCAAAAAGGATTATAAATTCCATGATGATCTAG |
| | | | | TTAGCTTGTTGATAAGATAACTTCTCTCCCGTATCCTCT |
| | | | | TGAATTTGATCACATTCACATCATATCAAGAAACTAAAA |
| | | | | TAGGTAGAATAGATTGGTGTTAGTTGAAAATAGTGCAAA |
| | | | | GAAACAAGCTAAGGTTAATAAATAAGACTTATTATACAG |
| | | | | GTGACAAGTAATATTATCACTAATTAAGCTAGATTCTAC |
| | | | | GTAATAAATAAGACTTATAATAAGACCCTATTAATATTC |
| | | | | TTGACGTGGACATTGTACGTAAATAATGGTAGTCGAGTC |
| | | | | AAAATGTATAGATAGATTGGAGAGTCAAAATGTAAATAA |
| | | | | TGGTAATCGCAATTATTTCACCCATTTTCTTCTTTTTAA |
| | | | | TCAGCACCATCCATAACAAACATTCGATTATGCTGTGAA |
| | | | | CAAATCAGATCATGAAAGTAAGTCAAGGTGAACAAATCA |
| | | | | GATCATGCAAATTACAATTATGCTACAAAGAACTCAAAC |
| | | | | TTGTTCCAAAGCTCGAAATCCAAGAAAGTCTCAGGGGTT |
| | | | | AAAATAAACAATGCTAGGACAAATTCGAATCCAAAAGTT |
| | | | | TGTCTTTCGTTCATTGCACCATATTTAATTAAACATAAA |
| | | | | TCCATACAAACATAAGAAATTCCTAAACATCATTCAACA |
| | | | | CATAATAGCTAATGCAATTCGCACTCCCTTCCGTATTCT |
| | | | | GCTCGGCCAAACTTGGGTTACTCCACTTCCTTCTTTACA |
| | | | | CCCTGAAATTCAATTGAAATCAGTTTGCAACTTACATGA |
| | | | | GTCGACAACAGGACAATGAAGTTATTAAAATAGGTGACA |
| | | | | CAAAGAGGCAGCACACAAGAATCTAGATTAATACCCCAA |
| | | | | AATGCATTTTGATAATTAAACAAGAATCTAGTTTGCAAT |
| | | | | TTTGTGTTAACAACAAACCAGTGGGCATTTAATTTATGT |
| | | | | TTTAAAATATTACTAAACCCTAAACCCTTAACTTTGTTT |
| | | | | ATATTAAACCATGCACAACCATTAACTTTGTTTATATTA |
| | | | | AAAATTATGTTATAAAATATTACTAAACCCTAAACCCTT |
| | | | | ATTCGGATATGGTCATACCTCGATGCGACCATGCATCTC |
| | | | | CCCCTCTATTAGCTGTGAGCGAGTGAAGTGCACCTTGCC |
| | | | | TTCATCCCAAAGCATTAAGAGGCCGCCTGTTTTCCCTCG |
| | | | | TGGAGGAGTGTACACCATTTTGTAATGTAGGCCAACTGC |
| | | | | TTCAAGGATGTTGTTGGTGTGGAATGGGGAAGTTCTACT |
| | | | | CTCAGAGATGAAGAGTACACATGGCGTGTGATGGGTGGC |
| | | | | CAAGTGAT |
| 100 | Kochia | Genomic | 4546 | CCCTCGTTTTCCTCTTCTTTTTTTCCATACAGGTTTTGT |
| | scoparia | | | AGTCATTTAGTGGAGGTGGGTTGATCTCCTAATAAAGTG |
| | | | | GGTTTGTCGATTCTTCTTTCTTCTGCAACCAGCAGAGCC |
| | | | | GAGTTGAATTGAGGTGCAGCCTTGAGGAAGACCTGAAAC |
| | | | | AAAGTCATTACAAAGAGAATTATAGATGTTCATGATTCT |
| | | | | GTGTAAGCCTGATGAGCTTTGTAAAACTTTGTAGTTTGT |
| | | | | GCAATTTGGTAATTGATTTTGTAACCACCATCGTTATCT |
| | | | | TTAGCGCGCCTTATGGTAAATTTGGAAGCATAATGAGCT |
| | | | | AAAAGATCCCAATTTGGCTTTGTAAAATTGCTATTGATT |
| | | | | GGAACCTTGTTTTTGGGAGCTTGAAACGATTACTTCAAA |
| | | | | CAAACAAAAAAAATTGTTGATGCCGTAATGCGGTATATA |
| | | | | GTGTTTGTCCTTAATTAGACATTTGGGGTTTTTTTTCCC |
| | | | | AACTTGAATTTGACAAAGATGAGATCCCAGGAATAAGTG |
| | | | | ACAGCCAAAACTTAAGTTGGTGCAACAACTAGTGTAATT |
| | | | | CATAAATTTTGTATGGTGTGATAGTGTCAAAATTATAAC |
| | | | | TAGGGCACACAAAATGACTGCAATAATGCTTAATAAGCA |
| | | | | CTAAATGTACTTTGTGTCGAATTTTGAGTCAAGTCCACG |
| | | | | TGTCTTTGGATCGGATAAGACAGTCCATGGTTTAGCCAA |
| | | | | CGAGTCAGGTTCACGTGTCTTTGGGTCGTATAAGACGAT |
| | | | | CCATGGTCTAACCCGGTGACGATGCGCCGTGCCCTAGTT |
| | | | | GCCCACTAGTAGGCAAGGAAAGTGGTGTTTGCATGGAGC |
| | | | | CTAAGAAGATATGGATTAGGCTGTCACTGATCCCTTGTG |
| | | | | GCCTTGTATGTTAATCAAATTATTAGTAGAGGTTATAAA |
| | | | | GGGGGGGTTGGTGAGCTACTAAACTGATTGCCTTGTTGA |
| | | | | TTGACAAAACCATTTTATGATTTTAGTTCCATCTTTATT |
| | | | | CAATAGTTTATATATGGTGTGCTACACTAGTATTATTAC |
| | | | | TATTATATGATGGAATATTATTCTCTCCTTTTCTTTCAC |
| | | | | ACATATTCTTTTTATCTACTACATTAATTTATATAATAC |
| | | | | CACATGAAGTATATACAAAGTTGCTTATTTCTTATGTAA |
| | | | | TAAGCACATGATCATTGTGATATTAATTAATCTTTTCGT |
| | | | | GGAGAAAATGACTAGAGGAAAATTCAAAATATTAAAGTG |
| | | | | TTTTTATGAACAAATGAACAAATGGTGTTAATCTAATTT |
| | | | | CATAGACAAGTTGGTAACTATGGTCAATCACCTCGGGAA |
| | | | | AAAGTAATGACAATTGTATCGATAGTTTGGTTCATGTGG |
| | | | | AATCAAAAAAATTTATCGAATTCATATTATTAATTTTGT |
| | | | | GTGCGAATGAATATCTATATTTCATGGAATATTGACTAA |
| | | | | ATTGTGTGATTTAGACTAAATAAAAATGCATTAACGAGA |
| | | | | GTCGATGAAATCGTTAAAGGATTAAAACATTAATAAAAT |
| | | | | GATTTATATTTTAACTTTTTCATAGTTAACCTAAAATAG |
| | | | | ACAAAAAATTACTCATACTCGATATAAAAAAGGATTTTT |
| | | | | TTATATATAAATAAACATAGAGATATATAATTTTAAAAA |
| | | | | AAAATAGCTCGAACTTATTCTCCCATTTGTTTTATCCTT |
| | | | | TATTGATGTAAATCACTAACAAAGTTAATTATCATTCCA |
| | | | | TTCTTAATTTTTTTTAATGAAGGTCAATATTCTTACAAT |
| | | | | AGTGATTAGCTTTTTCAATATAATTTTGTTCCAAAAAAA |
| | | | | ATATTAGTGATCTTTCTTTTTAAAAAAAATGGTAGCACT |
| | | | | AGCACACCAACACTCTCACAAATTCAACCACAACAACCC |
| | | | | ATGTTTTTGATTTGCCCAATTTCTTCTTCACCAACCCCC |
| | | | | TTCTCTCTTCCACCTAATTTTGGTTGGTGAATCCTTCTT |
| | | | | CTCATTCTCTCTCCTAAAAAGAAGCTTAAACCCATCGTC |
| | | | | AATCATATAGTATTAGCCATCAAAAACAACAACAAGAGA |
| | | | | GAGAAGAAACAATGGCTCAAGCTACCACCTTTAACAATG |
| | | | | GTGTCAAAAATGGTCATCAATTATGCGCCAATTTACCAA |
| | | | | AAACCCACTTGCCCAAATCTCAAAAAGCTGTCAAATTTG |
| | | | | GATCAAACTTGAGATTTTCTCCAAAGTTGAAGTCTTTCA |
| | | | | ACAATGAAAGAGTTTCTGGGAAATCATCAGTTGTTTTTA |
| | | | | AGGTTCATGCTTCAGTTGCTGCTGCTCCCTCAACTTCCC |
| | | | | CAGAAATTGTGTTGCAACCCATTAAGGAGATTTCTGGCA |
| | | | | CTGTTCAATTGCCTGGTTCTAAGTCTTTATCTAATCGAA |
| | | | | TTCTTCTTTTAGCTGCTCTTTCTGAGGTACTTTTCGATT |
| | | | | GTTTGATTTCATCTTTTACCCTGAATTTGGCGTTTGTTT |
| | | | | AATGCAGTTTTTGTGTTTTGAATCTTTGTAATTTATGTT |
| | | | | AAGTTTTAAAAGAATGATGCTTCTTGTTTCTCTTGTTGT |
| | | | | TTGTGCATTGGTTGTTGGATTGGTATCATTGAGAAATAT |
| | | | | GTATGCATTAGTAAAAATTGGTGTGTTTTGTGTAGTTTT |
| | | | | GCATTAAGTTGTTTAATTGATATCATTGAGAAATTGGGT |
| | | | | TCAGTACATTGTTTGACTTTGGAATATAAAAATTGGTGG |
| | | | | AAAAAAAACAGCAGATTTTTAACAAATGATTGTTATGTG |
| | | | | AAGATTTGTTATCATATAATGGAGGATGAAAGTCCTGAA |
| | | | | GTTGTATGAACTAGATGATAAAACCTCACTTTCACTGAT |
| | | | | TTCGGGGTGGACAATCAAAGAACCTTGATCGAGTAGGAG |
| | | | | CAAAATGACACCCTGAACATAGATGAACAGGCTTCATAA |
| | | | | TATATGTATTCACTTGATGCTTTCGGTTACCTCGAACTG |
| | | | | CTGATGAGGTTGAGGAAATTGGGATGTGTGGTGCACTTT |
| | | | | TTCATTTTGGTGGCAAGAATGCAAGCCTTATGGTACGGC |
| | | | | TTGGGAGCGATCACTGATTAGTTGGCTCAAGCTTGACTT |
| | | | | TTCTAGGGAGACTATCTCGAGGAAGGTGGTTTAGTTTAA |
| | | | | TACGGTGTACAGTAGTCGAATCCTCACAAATCACAACTC |
| | | | | AAATCCAAGTAAAAGGGACAACTACACATGAAACTCAGA |
| | | | | TTAGTTCATTTATCAATACCTCAAGAACATACTTAAGGA |
| | | | | ACCAAGTACAATTTCTTCTCTAGATATTGAAAGGGGAGG |
| | | | | AAGTGATATAAAAACCTAAACTCTTGTCAGGCCACACTT |
| | | | | AAAGGTCCACATCATATACCCCAGAACTATAGGTTAAAG |
| | | | | ACATACAGTACATAAGAATTACGTCGATATGTTGAAAGA |
| | | | | ACTGTCAGATTCTAACATAATTGCACACAAGCATTCCTC |
| | | | | TACAATCTGAGTTTAACGAAATTCCCATCGCCTGCTTGC |
| | | | | AACAATGGGCATCGTAAGTCCATTCACTAGCACCTTCAT |
| | | | | CTTCACCTTCACCTTCACTTGACCCAGATGGCACATTGT |
| | | | | AGTGCAATTTGAAAAACTATTCTGAGAACTTACATAACC |
| | | | | AGCCTTTGTTCATAGTTACAGTCCTTCGAATCCTACTCC |
| | | | | TTAGGCATGCACAATTTCTTCCTATCAATAAGGAGCTTT |
| | | | | TAGGTTCTCAAAACTGAGGTGGGAAGGAAAGTTGAGAAT |
| | | | | AGTATGCATTTAAGTTTGTTTTTTCATTTTTCGTTCCTG |
| | | | | AACAACTACACATGTCTCCTGTAGATGGACTTTGGTACT |
| | | | | AGTGTAATTCTGTGTCAGTCTCATGTCTGCTGCGTTTTT |
| | | | | GCACCCTCCCTTTTTCTTTGACCTTGTGTTGTCCTATTT |
| | | | | TCTAAAGTTTCAACAACCTAACCAAATTTATGCTGCAGG |
| | | | | GTACAACAGTACTTGACAACTTGCTATATAGTGATGATA |
| | | | | TTCGCTATATGTTGGATGCTCTAAGAACTCTTGGGCTCA |
| | | | | ACGTAGAGGATGATAATAAGGCCAAAAGGGCAATCGTGG |
| | | | | AGGGTTGTGGCGGTCTATTTCCTGCTGGTAAAGAGAATA |
| | | | | GGAGTGAGATTGAACTTTTCCTTGGAAACGCGGGAACGG |
| | | | | CAATGCGCCCATTGACAGCTGCAGTTGCCGTTGCTGGAG |
| | | | | GAAATTCCAGGTTAGTGAATAACGATTTCTATGTGGATG |
| | | | | TAATACTGATAGGTTTGTGTAAGGCTTATGATATAGTTG |
| | | | | CACGATAGGTCTACTAGAAAGATGCTATTCATTGTGAAA |
| | | | | AAATATGTTAGATTAATGTTTGTGAAATGAAAATTTAAA |
| | | | | GAGATTGTAACTGTGGAAGTATTGCTGATGGATGAACAC |
| | | | | AAACTAGATATAATTAAAAGGCTAACAGCGTGTATTATC |
| | | | | TCGTTAATATCTGATGAACTTTTTCAGATTTATCTAAAC |
| | | | | ATAAGCTATTGTATTGGGATTAGGATAATTCTCGTAGTC |
| | | | | CAGACATCCTGTCATGGAGTAAGGATTCTTAAGACTATG |
| | | | | GATGGTTAATTCAAACTCTGGCAATCATCTTTTGGTAGT |
| | | | | GAGAAAACTGCTGTCTTTTTTAGAATCTTCTTTATCCAT |
| | | | | AAACTCTTAAATCCTAAATAAACCGGAAGCAATCTTGGT |
| | | | | CGTTGATTTTTGAGATGTATGGTCAAGATGTGCATAAGT |
| | | | | TTAATAGTAAATGTGCATATTT |
| 101 | Kochia | Genomic | 57 | GTTTTTGCACATTCACAGGAAAATTCGTGCACATTTACG |
| | scoparia | | | TACAAAAATTTGCACATT |
| 102 | Kochia | cDNAContig | 1548 | ATGGCTCAAGCTACCACCTTTAACAATGGTGTCAAAAAT |
| | scoparia | | | GGTCATCAATTATGCGCCAATTTACCAAAAACCCACTTG |
| | | | | CCCAAATCTCAAAAAGCTGTCAAATTTGGATCAAACTTG |
| | | | | AGATTTTCTCCAAAGTTGAAGTCTTTCAACAATGAAAGA |
| | | | | GTTTCTGGGAAATCATCAGTTGTTTTTAAGGTTCATGCT |
| | | | | TCAGTTGCTGCTGCTCCCTCAACTTCCCCAGAAATTGTG |
| | | | | TTGCAACCCATTAAGGAGATTTCTGGCACTGTTCAATTG |
| | | | | CCTGGTTCTAAGTCTTTATCTAATCGAATTCTTCTTTTA |
| | | | | GCTGCTCTTTCTGAGGGTACAACAGTACTTGACAACTTG |
| | | | | CTATATAGTGATGATATTCGCTATATGTTGGATGCTCTA |
| | | | | AGAACTCTTGGGCTCAACGTAGAGGATGATAATAAGGCC |
| | | | | AAAAGGGCAATCGTGGAGGGTTGTGGCGGTCTATTTCCT |
| | | | | GCTGGTAAAGAGAATAGGAGTGAGATTGAACTTTTCCTT |
| | | | | GGAAACGCGGGAACGGCAATGCGCCCATTGACAGCTGCA |
| | | | | GTTGCCGTTGCTGGAGGAAATTCCAGTTATGTACTTGAT |
| | | | | GGAGTGCCAAGAATGAGGGAGCGACCCATTGGGGATCTG |
| | | | | GTAGCTGGTCTGAAGCAACTGGGTGCAGATGTTGACTGT |
| | | | | TTTCTTGGCACAAATTGTCCTCCTGTAAGAGTAAATGCT |
| | | | | AAAGGAGGTCTTCCAGGGGGCAAGGTCAAGCTCTCAGGA |
| | | | | TCAGTTAGTAGCCAATATCTTACTGCGCTACTCATGGCT |
| | | | | ACCCCTTTGGCTCTTGGAGATGTGGAGGTTGAAATCATT |
| | | | | GATAAATTGATTTCTGTCCCTTACGTAGAGATGACAATA |
| | | | | AAGTTAATGGAACGGTTTGGAGTGTCAATAGAGCATACT |
| | | | | GCTAGCTGGGACAGGTTTTTGATCCGAGGTGGTCAGAAG |
| | | | | TACAAATCTCCTGGAAATGCATTTGTTGAGGGTGATGCT |
| | | | | TCAAGTGCCAGTTACTTCTTAGCAGGGGCCGCGATCACT |
| | | | | GGTGGGACTGTGACTGTTGAGGGTTGTGGAACAAGCAGT |
| | | | | TTGCAGGGTGATGTTAAATTCGCGGAGGTTCTTGAGAAG |
| | | | | ATGGGTTGCAAAGTTACATGGACAGAGACCAGTGTCACT |
| | | | | GTAACTGGACCGCCCAGGGACTCATCTGGAAGAAAACAT |
| | | | | TTGCGTGCCATCGATGTTAACATGAACAAAATGCCAGAT |
| | | | | GTTGCGATGACTCTTGCTGTTGTTGCCCTATATGCAGAT |
| | | | | GGGCCCACAGCTATCAGAGACGTTGCTAGCTGGAGAGTG |
| | | | | AAGGAAACAGAAAGGATGATTGCCATCTGTACAGAACTC |
| | | | | AGAAAGCTTGGAGCAACAGTTGAGGAAGGACCTGATTAC |
| | | | | TGTGTGATCACTCCACCAGAAAAACTAAACGTAACCGCC |
| | | | | ATCGACACATATGATGATCATCGAATGGCCATGGCATTC |
| | | | | TCTCTTGCTGCCTGTGCTGATGTTCCTGTCACTATTAAG |
| | | | | GACCCAGGCTGCACCCGCAAGACCTTCCCAGACTACTTT |
| | | | | GACGTCTTGGAACGGTTTGCCAAGCAT |
| 103 | Kochia | Genomic | 5426 | GGGGTATTTCATGGAAAACGCAAATTTACAGGGGTACCC |
| | scoparia | | | TGTAGAAAATCCCAACAAAAAAAATTGTTGATGCCGTAA |
| | | | | TGCGGTATATAGTGTTTGTCCTTAATTAGACATTTGGGG |
| | | | | TTTTTTTTCCCAACTTGAATTTGACAAAGATGAGATCCC |
| | | | | AGGAATAAGTGACAGCCAAAACTTAAGTTGGTGCAACAA |
| | | | | CTAGTGTAATTCATAAATTTTGTATGGTGTGATAGTGTC |
| | | | | AAAATTATAACTAGGGCACACAAAATGACTGCAATAATG |
| | | | | CTTAATAAGCACTAAATGTACTTTGTGTCGAATTTTGAG |
| | | | | TCTAGTTTACGTGTCTTTGGATCGGATAAGACAGTCCAT |
| | | | | GGTTTAGCCCATGAGTCAGGTTCACGTGTCTTTGGATCG |
| | | | | TATAAGACGATCCATGGTCTAACCCGGTGACGATGCGCC |
| | | | | GTGCCCTAGTTGCCCACTAGTAGGCAAGGAAAGTGGTGT |
| | | | | TTGCATGGAGCCTAAGAAGATATGGATTAGGCTGTCACT |
| | | | | GATTCCTTGTGGCCTTGTATGTTGATCAAATTATTAGCA |
| | | | | GAGGTTATAAAGGGGGGTTGGTGAGCTACTAAACTGATT |
| | | | | GCCTTGTTGATTGACAAAACCATTTTATGATTTTAGTTC |
| | | | | CATCTTTATTCAATAGTTTATATATGGTGTGCTACACTA |
| | | | | GTATTATATGATGGAATATTATTCTCTCCTTTTCTTTCA |
| | | | | CAAATATTCTTTTTATCTACTACATTAATTTATATAATA |
| | | | | CCACATGAAGTATATAAAAAGTTGCTTTTTCTTATGTAA |
| | | | | TAAGCACATGATCATTGTGATTTTAATTAATCTTTTCGT |
| | | | | GGAGAAAATGACTAGAGGAAAATTCAAAATATTAAAGTG |
| | | | | TTTTTATGAACAAATGAACAAATGGTGTTAATCTAATTT |
| | | | | CATAGACAAGTTGGTAACTATGGTCAATCACCTCGGAAA |
| | | | | AAGTAATGACAATTGTATCGATAGTTTGGTTCATGTGGA |
| | | | | ATCAAAAAAATTTATCGAATTCATATTATTAATTTTGTG |
| | | | | TGCGAATGAATATCTATATTTCATGGAATATTGACTAAA |
| | | | | TTGTGTGATTTAGACTAAATAAAAATGCATTAACGAGAG |
| | | | | TCGATGAAATCGTTAAAGGATTAAAACATTAATAAAATG |
| | | | | ATTTATATTTTAACTTTTTCATAGTTAACCTAAAATAGA |
| | | | | CAAAAAATTACTCATACTCGATATAAAAAAGGATTTTTT |
| | | | | TATATATAAATAAACATAGAGATATATAATTTTAAAAAA |
| | | | | AAATAGCTCGAACTTATTCTCCCATTTGTTTTATCCTTT |
| | | | | ATTGATGTAAATCACTAACAAAGTTAATTATTCCATTCC |
| | | | | TAATTTTTTTTTATGAAGGTCAATATTCTTACAATAGTG |
| | | | | ATTAGCTTTTTCAATATAATTTTTTTCCAAAAAAATATT |
| | | | | AGTGATCTTTCTTTTTTTAAAAATGGTAGCACTAGCACA |
| | | | | CCAACACTCTCACAAATTCAACCACAACAACCCATGTTT |
| | | | | TTGATTTGCCCAATTTCTTCTTCACCAACCCCCTTCTCT |
| | | | | CTTCCACCTAATTTTGGTTGGTGAATCCTTCTTCTCATT |
| | | | | CTCTCTCCTAAAAAGAAGCTTAAACCCATCGTCAATCAT |
| | | | | ATAGTATTAGCCATCAAAAACAACAAGAGAGAGAAGAAA |
| | | | | CAATGGCTCAAGCTACCACCTTTAACAATGGTGTCAAAA |
| | | | | ATGGTCATCAATTATGCGCCAATTTACCAAAAACCCACT |
| | | | | TGCCCAAATCTCAAAAAGCTGTCAAATTTGGATCAAACT |
| | | | | TGAGATTTTCTCCAAAGTTGAAGTCTTTCAACAATGAAA |
| | | | | GAGTTTCTGGGAAATCATCAGTTGTTTTTAAGGTTCATG |
| | | | | CTTCAGTTGCTGCTGCTCCCTCAACTTCCCCAGAAATTG |
| | | | | TGTTGCAACCCATTAAGGAGATTTCTGGCACTGTTCAAT |
| | | | | TGCCTGGTTCTAAGTCTTTATCTAATCGAATTCTTCTTT |
| | | | | TAGCTGCTCTTTCTGAGGTACTTTTCGATTGTTTGATTT |
| | | | | CATCTTTTACCCTGAATTTGGCGTTTGTTTAATGCAGTT |
| | | | | TTTGTGTTTTGAATCTTTGTAATTTATGTTAAGTTTTAA |
| | | | | AAGATTGATGCTTCTTGTTTCTCTTGTTGTTTGTGCATT |
| | | | | GGTTGTTGGATTGGTATCATTGAGAAATATGTATGCATT |
| | | | | AGTAAAAATTGGTGTGTTTTGTGTAGTTTTGCATTAAGT |
| | | | | TGTTTAATTGATATCATTGAGAAATTGGGTTCAGTACAT |
| | | | | TGTTTGACTTTGGAATATAAAAATTGGTGGAAAAAAAAC |
| | | | | AGCAGATTTTTAACAAATGATTGTTATGTGAAGATTTGT |
| | | | | TATCATATAATGGAGGATGAAAGTCCTGAAGTTGTATGA |
| | | | | ACTAGATGATAAAACCTCACTTTCACTGATTTCGGGGTG |
| | | | | GACAATCAAAGAACCTTGATCGAGTAGGAGCAAAATGAC |
| | | | | ACCCTGAACATAGATGAACAGGCTTCATAATATATGTAT |
| | | | | TCACTTGATGCTTTCGGTTACCTCGAACTGCTGATGAGG |
| | | | | TTGAGGAAATTGGGATGTGTGGTGCACTTTTTCATTTTG |
| | | | | GTGGCAAGAATGCAAGCCTTATGGTACGGCTTGGGAGCG |
| | | | | ATCACTGATTAGTTGGCTCAAGCTTGACTTTTCTAGGGA |
| | | | | GACTATCTCGAGGAAGGTGGTTTAGTTTAATACGGTGTA |
| | | | | CAGTAGTCGAATCCTCACAAATCACAACTCAAATCCAAG |
| | | | | TAAAAGGGACAACTACACATGAAACTCAGATTAGTTCAT |
| | | | | TTATCAATACCTCAAGAACATACTTAAGGAACCAAGTAC |
| | | | | AATTTCTTCTCTAGATATTGAAAGGGGAGGAAGTGATAT |
| | | | | AAAAACCTAAACTCTTGTCAGGCCACACTTAAAGGTCCA |
| | | | | CATCATATACCCCAGAACTATAGGTTAAAGACATACAGT |
| | | | | ACATAAGAATTACGTCGATATGTTGAAAGAACTGTCAGA |
| | | | | TTCTAACATAATTGCACACAAGCATTCCTCTACAATCTG |
| | | | | AGTTTAACGAAATTCCCATCGCCTGCTTGCAACAATGGG |
| | | | | CATCGTAAGTCCATTCACTAGCACCTTCATCTTCACCTT |
| | | | | CACCTTCACTTGACCCAGATGGCACATTGTAGTGCAATT |
| | | | | TGAAAAACTATTCTGAGAACTTACATAACCAGCCTTTGT |
| | | | | TCATAGTTACAGTCCTTCGAATCCTACTCCTTAGGCATG |
| | | | | CACAATTTCTTCCTATCAATAAGGAGCTTTTAGGTTCTC |
| | | | | AAAACTGAGGTGGGAAGGAAAGTTGAGAATAGTATGCAT |
| | | | | TTAAGTTTGTTTTTTCATTTTTCGTTCCTGAACAACTAC |
| | | | | ACATGTCTCCTGTAGATGGACTTTGGTACTAGTGTAATT |
| | | | | CTGTGTCAGTCTCATGTCTGCTGCGTTTTTGCACCCTCC |
| | | | | CTTTTTCTTTGACCTTGTGTTGTCCTATTTTCTAAAGTT |
| | | | | TCAACAACCTAACCAAATTTATGCTGCAGGGTACAACAG |
| | | | | TACTTGACAACTTGCTATATAGTGATGATATTCGCTATA |
| | | | | TGTTGGATGCTCTAAGAACTCTTGGGCTCAACGTAGAGG |
| | | | | ATGATAATAAGGCCAAAAGGGCAATCGTGGAGGGTTGTG |
| | | | | GCGGTCTATTTCCTGCTGGTAAAGAGAATAGGAGTGAGA |
| | | | | TTGAACTTTTCCTTGGAAACGCGGGAACGGCAATGCGCC |
| | | | | CATTGACAGCTGCAGTTGCCGTTGCTGGAGGAAATTCCA |
| | | | | GGTTAGTGAATAACGATTTCTATGTGGATGTAATACTGA |
| | | | | TAGGTTTGTGTAAGGCTTATGATATAGTTGCACGATAGG |
| | | | | TCTACTAGAAAGATGCTATTCATTGTGAAAAAATATGTT |
| | | | | AGATTAATGTTTGTGAAATGAAAATTTAAAGAGATTGTA |
| | | | | ACTGTGGAAGTATTGCTGATGGATGAACACAAACTAGAT |
| | | | | ATAATTAAAAGGCTAACAGCGTGTATTATCTCGTTAATA |
| | | | | TCTGATGAACTTTTTCAGATTTATCTAAACATAAGCTAT |
| | | | | TGTATTGGGATTAGGATAATTCTCGTAGTCCAGACATCC |
| | | | | TGTCATGGAGTAAGGATTCTTAAGACTATGGATGGTTAA |
| | | | | TTCAAACTCTGGCAATCATCTTTTGGTAGTGAGAAAACT |
| | | | | GCTGTCTTTTTTAGAATCTTCTTTATCCATAAACTCTTA |
| | | | | AATCCTAAATAAACCGGAAGCAATCTTGGTCGTTGATTT |
| | | | | TTGAGATGTATGGTCAAGATGTGCATAAGTTTAATAGTA |
| | | | | AATGTGCATATTTTTTTGGTTTTTGCACATTCACAGGAA |
| | | | | AATTCGTGCACATTTACGTACAAAAATTTGCACATTTAC |
| | | | | TTTTTTCATGAAATAAATCTTGATCCTTCATTCAAAATC |
| | | | | CAACGATCAAAATTGCTTCTCACGTTTCTCATTTTAAGG |
| | | | | GTGCTTCTCATTTGATCCTAAATCTATATACATATGTAA |
| | | | | GTACCTTGAATGCCATGGAATTGAAATTTTAAATTATGT |
| | | | | GTTGGTTGTGAATGGGGTTAATGAAGTAGATAGAGTAGG |
| | | | | CTGACAAATATTCCAAGGGGTACCTACAGCTACTCTTGG |
| | | | | TCACTAAGTCATTGTTCTGTTTTTAGATTTTAATTGCTT |
| | | | | TCCCTTATGGTTTTTTCAGTTATGTACTTGATGGAGTGC |
| | | | | CAAGAATGAGGGAGCGACCCATTGGGGATCTGGTAGCTG |
| | | | | GTCTGAAGCAACTGGGTGCAGATGTTGACTGTTTTCTTG |
| | | | | GCACAAATTGTCCTCCTGTAAGAGTAAATGCTAAAGGAG |
| | | | | GTCTTCCAGGGGGCAAGGTAGAGTAAATTTCTTGTAGAT |
| | | | | TAACTTTGTTGATAATTCACTCATTAATATATCAATGAG |
| | | | | ACATCCTCAAAAAATAACTCTGTCCTGTTTTCCTGTCAT |
| | | | | TAAGCTCTGTTACATAACTTACATTATTTTAAAGCATTT |
| | | | | TGATGGAATGTATCTGCAGGTCAAGCTCTCAGGATCAGT |
| | | | | TAGTAGCCAATATCTTACTGCGCTACTCATGGCTACCCC |
| | | | | TTTGGCTCTTGGAGATGTGGAGGTTGAAATCATTGATAA |
| | | | | ATTGATTTCTGTCCCTTACGTAGAGATGACAATAAAGTT |
| | | | | AATGGAACGGTTTGGAGTGTCAATAGAGCATACTGCTAG |
| | | | | CTGGGACAGGTTTTTGATCCGAGGTGGTCAGAAGTACAA |
| | | | | GTAAGTCACTCTTCTTTTACTTGCATGTATTGAACGTCA |
| | | | | TTCCATTGGTAGACTGATGCAGCATTAATAATATGTCAG |
| | | | | ATCTCCTGGAAATGCATTTGTTGAGGGTGATGCTTCAAG |
| | | | | TGCCAGTTACTTCTTAGCAGGGGCCGCGATCACTGGTGG |
| | | | | GACTGTGACTGTTGAGGGTTGTGGAACAAGCAGTTTGCA |
| | | | | GGTATGATCCAAAGCCTCACTTCAATAAATTTTCAAGTA |
| | | | | CACATTCGTTTTACTTCCTCCGTTTTGTATTACTCGCAC |
| | | | | CGGTTTCCATTTTGGGAAATTTGCGAATACTTGCACCAC |
| | | | | TTTGCTTTATTCCCTTTTTTGGCAATTTATTTTGTTTGA |
| | | | | AATGA |
| 104 | Kochia | Genomic | 2430 | CACTACCCTTCCCTCAACTAATTATACCAACAAAAAAAC |
| | scoparia | | | GCCTTGGAGTCCGCAATAATGAAAGTGGTGCGAGTAATA |
| | | | | TAAAACGGAGGAAGTATTTATTTTTTAGATTAACTGTTG |
| | | | | TAACCATTTTTTGGTTAATTTTGAGGCTAAAGTATGGCC |
| | | | | TTTTGACAATTAACTTTCAATATTAATCTCTAATGTGGT |
| | | | | GTAAAGTCATCCATTTTAATATCAGACAATTGTGTTTGA |
| | | | | CTCCCAAAAAAGGATAATTTACTTCTTATTGTTTTGTGA |
| | | | | CTGCCAAAAAGGATCACTTGAATGTCATGGATTGTTTAA |
| | | | | TCACCTATTTAGGCATTGTTGTGTTGTGATTCACCTCAT |
| | | | | CTTTAGGTCCAATAGATTTTGGCTGAATCTTACTTGTGA |
| | | | | CTGCCAAAAAGGATCACTGACAATTTACTTGTTTAACGG |
| | | | | ATTTTACTCAGGGTGATGTTAAATTCGCGGAGGTTCTTG |
| | | | | AGAAGATGGGTTGCAAAGTTACATGGACAGAGACCAGTG |
| | | | | TCACTGTAACTGGACCGCCCAGGGACTCATCTGGAAGAA |
| | | | | AACATTTGCGTGCCATCGATGTTAACATGAACAAAATGC |
| | | | | CAGATGTTGCGATGACTCTTGCTGTTGTTGCCCTATATG |
| | | | | CAGATGGGCCCACAGCTATCAGAGACGGTATTAACTCCT |
| | | | | TTCTGATACATTACACTTTTCTTGTGCTATATATTGTTT |
| | | | | CAAATTTGATAATTCGATCATGCTTCAAATTTTGCACAC |
| | | | | AGCCGTAATCCATGGTTATAAAATGACTATGACACTTGT |
| | | | | CTTGTTACTGAAAAGTGCATACAGTAACAAAGCTGATGT |
| | | | | TACTTCTTAGTTTACTCTAATAATGGTTGGACGGTCACT |
| | | | | GGCGCACATCCCCATGGTTGGAAGTTGTGAATATTGTTG |
| | | | | TCATAATGGCTTATGGAGCATCTTTTGGTACACTTCAGG |
| | | | | AGTAAAAGACCACTAGTCCAGTATAGGGTTAATCACCTC |
| | | | | TAGAACTAGTTAGTCACATATACTCGGAAAATTATTCAT |
| | | | | ATTTTGTGGTTACATGCGTTCGTTTATCTGCATCTTGCC |
| | | | | TAGTGTCTCCTCTTGAAATCATTCATATATGTTCTTTTT |
| | | | | TTTCCCCTTCATCTGTTACATGTTCAAAATATGCTTACA |
| | | | | ACGAAATTGGGTAACTTGACCAGTTGCTAGCTGGAGAGT |
| | | | | GAAGGAAACAGAAAGGATGATTGCCATCTGTACAGAACT |
| | | | | CAGAAAGGTTAGCCACATTCTTTAATCTTGTAGTAAAAA |
| | | | | ATAAAGTTGCCTGTTTCATGTAAGTTGATGTTAATTCGG |
| | | | | ACTTTTAAAATTTTCAGCTTGGAGCAACAGTTGAGGAAG |
| | | | | GACCTGATTACTGTGTGATCACTCCACCAGAAAAACTAA |
| | | | | ACGTAACCGCCATCGACACATATGATGATCATCGAATGG |
| | | | | CCATGGCATTCTCTCTTGCTGCCTGTGCTGATGTTCCTG |
| | | | | TCACTATTAAGGACCCAGGCTGCACCCGCAAGACCTTCC |
| | | | | CAGACTACTTTGACGTCTTGGAACGGTTTGCCAAGCATT |
| | | | | GAGCGGCTATCTGCAGATTTTTCATAAAGTATGCACGAA |
| | | | | AGTTTCAATTTAAGAAGATACCGAGTTGATTATATGCTT |
| | | | | TCCGCATAAGTTATTGTCACATTTTTTGTATTATGTTTG |
| | | | | TAAGATCTTAGGCAATAAGATATACTGTTAGAAATTATG |
| | | | | TGTATCTGATTATTTAGAGATGTATACTTGGGTCAGTTG |
| | | | | AAATTGTACGAGAAAGGTCTGGATTTCGAAAAAAATGTG |
| | | | | ATCCAGACATTAGTGTGGTCTGAACTGAAGCAAGTACTC |
| | | | | CCTCCGTCTCATAATTCTCACAACTCTTGCTATTATTTG |
| | | | | TGAGAAATAAAATATTCAAGTGTTGCGAGAATTGTGTGA |
| | | | | CAGCGGGAGTAGCAACTTTTCAAGTTTGGAATTAATTTT |
| | | | | GTGATGTGAGTTTTTTGTGTATTCTTTGTTTTCCATCAA |
| | | | | ACCCTCCTCCAAAGTACAAACCCAATTCATGGTATGGTT |
| | | | | GATGCAACAGCAATATGTCAAAATCAGTGTTTGTGATGT |
| | | | | TGGCTTCTCTACTTCATTATCTCTTCTTGTTCAGTATGA |
| | | | | TTTCGCAATCTCTTCCCGTCAAAATCCCTTCTCCTCTGA |
| | | | | TAATCGCAGAAATCGTGTCTTCCCCTCGGTGTGTATCCA |
| | | | | CCTCTTAAAAATTTGTTGAGAGTTGAAATGTGCTGCCAC |
| | | | | TGGATTCATCCTTTAGGGCGAATTTTGAACGGATTTTAG |
| | | | | GTGGTTAGGATTCAACCCCTGTCAATTATAGTTACGGGA |
| | | | | ATTAGACACGCGTTCTGCCTTACCAACCCCATTTTTTTG |
| | | | | TCACTATATCAAGTATCCATTGCTAGTTGTAGTCATGTA |
| | | | | GTAGGGTCTGAAATCTAAAGCAAAGTAGCAAGATTGCAA |
| | | | | CAACAGGAACAGCAAATAAATCTAGACTTTTGAGGTTTG |
| | | | | TTTTTTTTTTTT |
| 105 | Kochia | Genomic | 4880 | TCACCTTCACTTGACCCAGATGGCACATTGTAGTGCAAT |
| | scoparia | | | TTGAAAAACTATTCTGAGAACTTACATAACCAGCCTTTG |
| | | | | TTCATAGTTACAGTCCTTCGAATCCTACTCCTTAGGCAT |
| | | | | GCACAATTTCTTCCTATCAATAAGGAGCTTTTAGGTTCT |
| | | | | CAAAACTGAGGTGGGAAGGAAAGTTGAGAATAGTATGCA |
| | | | | TTTAAGTTTGTTTTTTCATTTTTCGTTCCCTGAACAACT |
| | | | | ACACATGTCTCCTGTAGATGGACTTTGGTACTAGTGTAA |
| | | | | TTCTGTGTCAGTCTCATGTCTGCTGCGTTTTTGCACCCT |
| | | | | CCCTTTTTCTTTGACCTTGTGTTGTCCTATTTTCTAAAG |
| | | | | TTTCAACAACCTAACCAAATTTATGCTGCAGGGTACAAC |
| | | | | AGTACTTGACAACTTGCTATATAGTGATGATATTCGCTA |
| | | | | TATGTTGGATGCTCTAAGAACTCTTGGGCTCAACGTAGA |
| | | | | GGATGATAATAAGGCCAAAAGGGCAATCGTGGAGGGTTG |
| | | | | TGGCGGTCTATTTCCTGCTGGTAAAGAGAATAGGAGTGA |
| | | | | GATTGAACTTTTCCTTGGAAACGCGGGAACGGCAATGCG |
| | | | | CCCATTGACAGCTGCAGTTGCCGTTGCTGGAGGAAATTC |
| | | | | CAGGTTAGTGAATAACGATTTCTATGTGGATGTAATACT |
| | | | | GATAGGTTTGTGTAAGGCTTATGATATAGTTGCACGATA |
| | | | | GGTCTACTAGAAAGATGCTATTCATTGTGAAAAATATGT |
| | | | | TAGATTAATGTTTGTGAAATGAAAATTTAAAGAGATTGT |
| | | | | AACTGTGGAAGTATTGCTGATGGATGAACACAAACTAGA |
| | | | | TATAATTAAAAGGCTAACAGCGTGTATTATCTCGTTAAT |
| | | | | ATCTGATGAACTTTTTCAGATTTATCTAAACATAAGCTA |
| | | | | TTGTATTGGGATTAGGATAATTCTCGTAGTCCAGACATC |
| | | | | CTGTCATGGAGTAAGGATTCTTAAGACTATGGATGGTTA |
| | | | | ATTCAAACTCTGGCAATCATCTTTTGGTAGTGAGAAAAC |
| | | | | TGCTGTCTTTTTTAGAATCTTCTTTATCCATAAACTCTT |
| | | | | AAATCCTAAATAAACCGGAAGCAATCTTGGTCGTTGATT |
| | | | | TTTGAGATGTATGGTCAAGATGTGCATAAGTTTAATAGT |
| | | | | AAATGTGCATATTTTTTTGGTTTTTGCACATTCACAGGA |
| | | | | AAATTCGTGCACATTTACGTACAAAAATTTGCACATTTA |
| | | | | CTTTTTTCATGAAATAAATCTTGATCCTTCATTCAAAAT |
| | | | | CCAACGATCAAAATTGCTTCTCACGTTTCTCATTTTAAG |
| | | | | GGTGCTTCTCATTTGATCCTAAATCTATATACATATGTA |
| | | | | AGTACCTTGAATGCCATGGAATTGAAATTTTAAATTATG |
| | | | | TGTTGGTTGTGAATGGGGTTAATGAAGTAGATAGAGTAG |
| | | | | GCTGACAAATATTCCAAGGGGTACCTACAGCTACTCTTG |
| | | | | GTCACTAAGTCATTGTTCTGTTTTTAGATTTTAATTGCT |
| | | | | TTCCCTTATGGTTTTTTCAGTTATGTACTTGATGGAGTG |
| | | | | CCAAGAATGAGGGAGCGACCCATTGGGGATCTGGTAGCT |
| | | | | GGTCTGAAGCAACTGGGTGCAGATGTTGACTGTTTTCTT |
| | | | | GGCACAAATTGTCCTCCTGTAAGAGTAAATGCTAAAGGA |
| | | | | GGTCTTCCAGGGGGCAAGGTAGAGTAAATTTCTTGTAGA |
| | | | | TTAACTTTGTTGATAATTCACTCATTAATATATCAATGA |
| | | | | GACATCCTCAAAAAATAACTCTGTCCTGTTTTCCTGTCA |
| | | | | TTAAGCTCTGTTACATAACTTACATTATTTTAAAGCATT |
| | | | | TTGATGGAATGTATCTGCAGGTCAAGCTCTCAGGATCAG |
| | | | | TTAGTAGCCAATATCTTACTGCGCTACTCATGGCTACCC |
| | | | | CTTTGGCTCTTGGAGATGTGGAGGTTGAAATCATTGATA |
| | | | | AATTGATTTCTGTCCCTTACGTAGAGATGACAATAAAGT |
| | | | | TAATGGAACGGTTTGGAGTGTCAATAGAGCATACTGCTA |
| | | | | GCTGGGACAGGTTTTTGATCCGAGGTGGTCAGAAGTACA |
| | | | | AGTAAGTCACTCTTCTTTTACTTGCATGTATTGAACGTC |
| | | | | ATTCCATTGGTAGACTGATGCAGCATTAATAATATGTCA |
| | | | | GATCTCCTGGAAATGCATTTGTTGAGGGTGATGCTTCAA |
| | | | | GTGCCAGTTACTTCTTAGCAGGGGCCGCGATCACTGGTG |
| | | | | GGACTGTGACTGTTGAGGGTTGTGGAACAAGCAGTTTGC |
| | | | | AGGTATGATCCAAAGCCTCACTTCAATAAATTTTCAAGT |
| | | | | ACACATTCGTTTTACTTCCTCCGTTTTGTATTACTCGCA |
| | | | | CCGGTTTCCATTTTGGGAAATTTGCGAATACTTGCACCA |
| | | | | CTTTGCTTTATTCCCTTTTTTGGCAATTTATTTTGTTTG |
| | | | | AAATGACCATTTTAGCCTTATTGTTTTTCCCCACATGGT |
| | | | | GGGATCAAAGGAATTAACACCATAAAACACACCTCCTTT |
| | | | | ATACCCCACCAACTTAATCACACTACCCTTCCCTCAACT |
| | | | | AATTATACCAACAAAAAAACGCCTTGGAGTCCGCAATAA |
| | | | | TGAAAGTGGTGCGAGTAATATAAAACGGAGGAAGTATTT |
| | | | | ATTTTTTAGATTAACTGTTGTAACCATTTTTTGGTTAAT |
| | | | | TTTGAGGCTAAAGTATGGCCTTTTGACAATTAACTTTCA |
| | | | | ATATTAATCTCTAATGTGGTGTAAAGTCATCCATTTTAA |
| | | | | TATCAGACAATTGTGTTTGACTCCCAAAAAAGGATAATT |
| | | | | TACTTCTTATTGTTTTGTGACTGCCAAAAAGGATCACTT |
| | | | | GAATGTCATGGATTGTTTAATCACCTATTTAGGCATTGT |
| | | | | TGTGTTGTGATTCACCTCATCTTTAGGTCCAATAGATTT |
| | | | | TGGCTGAATCTTACTTGTGACTGCCAAAAAGGATCACTG |
| | | | | ACAATTTACTTGTTTAACGGATTTTACTCAGGGTGATGT |
| | | | | TAAATTCGCGGAGGTTCTTGAGAAGATGGGTTGCAAAGT |
| | | | | TACATGGACAGAGACCAGTGTCACTGTAACTGGACCGCC |
| | | | | CAGGGACTCATCTGGAAGAAAACATTTGCGTGCCATCGA |
| | | | | TGTTAACATGAACAAAATGCCAGATGTTGCGATGACTCT |
| | | | | TGCTGTTGTTGCCCTATATGCAGATGGGCCCACAGCTAT |
| | | | | CAGAGACGGTATTAACTCCTTTCTGATACATTACACTTT |
| | | | | TCTTGTGCTATATATTGTTTCAAATTTGATAATTCGATC |
| | | | | ATGCTTCAAATTTTGCACACAGCCGTAATCCATGGTTAT |
| | | | | AAAATGACTATGACACTTGTCTTGTTACTGAAAAGTGCA |
| | | | | TACAGTAACAAAGCTGATGTTACTTCTTAGTTTACTCTA |
| | | | | ATAATGGTTGGACGGTCACTGGCGCACATCCCCATGGTT |
| | | | | GGAAGTTGTGAATATTGTTGTCATAATGGCTTATGGAGC |
| | | | | ATCTTTTGGTACACTTCAGGAGTAAAAGACCACTAGTCC |
| | | | | AGTATAGGGTTAATCACCTCTAGAACTAGTTAGTCACAT |
| | | | | ATACTCGGAAAATTATTCATATTTTGTGGTTACATGCGT |
| | | | | TCGTTTATCTGCATCTTGCCTAGTGTCTCCTCTTGAAAT |
| | | | | CATTCATATATGTTCTTTTTTTCCCCTTCATCTGTTACA |
| | | | | TGTTCAAAATATGCTTACAACGAAATTGGGTAACTTGAC |
| | | | | CAGTTGCTAGCTGGAGAGTGAAGGAAACAGAAAGGATGA |
| | | | | TTGCCATCTGTACAGAACTCAGAAAGGTTAGCCACATTC |
| | | | | TTTAATCTTGTAGTAAAAAATAAAGTTGCCTGTTTCATG |
| | | | | TAAGTTGATGTTAATTCGGACTTTTAAAATTTTCAGCTT |
| | | | | GGAGCAACAGTTGAGGAAGGACCTGATTACTGTGTGATC |
| | | | | ACTCCACCAGAAAAACTAAACGTAACCGCCATCGACACA |
| | | | | TATGATGATCATCGAATGGCCATGGCATTCTCTCTTGCT |
| | | | | GCCTGTGCTGATGTTCCTGTCACTATTAAGGACCCAGGC |
| | | | | TGCACCCGCAAGACCTTCCCAGACTACTTTGACGTCTTG |
| | | | | GAACGGTTTGCCAAGCATTGAGCGGCTATCTGCAGATTT |
| | | | | TTCATAAAGTATGCACGAAAGTTTCAATTTAAGAAGATA |
| | | | | CCGAGTTGATTATATGCTTTCCGCATAAGTTATTGTCAC |
| | | | | ATTTTTTGTATTATGTTTGTAAGATCTTAGGCAATAAGA |
| | | | | TATACTGTTAGAAATTATGTGTATCTGATTATTTAGAGA |
| | | | | TGTATACTTGGGTCAGTTGAAATTGTACGAGAAAGGTCT |
| | | | | GGATTTCGAAAAAAATGTGATCCAGACATTAGTGTGGTC |
| | | | | TGAACTGAAGCAAGTACTCCCTCCGTCTCATAATTCTCA |
| | | | | CAACTCTTGCTATTATTTGTGAGAAATAAAATATTCAAG |
| | | | | TGTTGCGAGAATTGTGTGACAGCGGGAGTAGCAACTTTT |
| | | | | CAAGTTTGGAATTAATTTTGTGATGTGAGTTTTTTGTGT |
| | | | | ATTCTTTGTTTTCCATCAAACCCTCCTCCAAAGTACAAA |
| | | | | CCCAATTCATGGTATGGTTGATGCAACAGCAATATGTCA |
| | | | | AAATCAGTGTTTGTGATGTTGGCTTCTCTACTTCATTAT |
| | | | | CTCTTCTTGTTCAGTATGATTTCGCAATCTCTTCCCGTC |
| | | | | AAAATCCCTTCTCCTCTGATAATCGCAGAAATCGTGTCT |
| | | | | TCCCCTCGGTGTGTATCCACCTCTTAAAAATTTGTTGAG |
| | | | | AGTTGAAATGTGCTGCCACTGGATTCATCCTTTAGGGCG |
| | | | | AATTTTGAACGGATTTTAGGTGGTTAGGATTCAACCCCT |
| | | | | GTCAATTATAGTTACGGGAATTAGACACGCGTTCTGCCT |
| | | | | TACCAACCCCATTTTTTTGTCACTATATCAAGTATCCAT |
| | | | | TGCTAGTTGTAGTCATGTAGTAGGGTCTGAAATCTAAAG |
| | | | | CAAAGTAGCAAGATTGCAACAACAGGAACAGCAAATAAA |
| | | | | TCTAG |
| 106 | Lolium | Genomic | 6967 | GATAAACTGATCTCTGTTCCTTATGTTGAAATGACATTG |
| | multiflorum | | | AGATTGATGGAGCGTTTTGGCGTGACGGCAGAGCATTCT |
| | | | | GATAGCTGGGACAGATTCTACATTAAAGGAGGACAGAAG |
| | | | | TACAAGTAAGTTTTGAATTGTTCTGCTTATTCTAAGCAT |
| | | | | TTGTCACATTTGACTTCTGGATAAACTACAGAATTGAAT |
| | | | | ATTAGAAAGAAATATTGACTGCTCAAGTAACTTTATTTA |
| | | | | TCTGGAAATGACCATGCTGTTATTAGCTATGAAGTCAAG |
| | | | | CTTTACTAGGAAATCAGTGCCTTAGGCAATTGACTATGC |
| | | | | TACTTACAATGCACTGGCTGCACAGCTATGTTTTCTGGT |
| | | | | GCATAAACATTTATTCATCTGGCTAGGACCAAACTTTTA |
| | | | | GTAGCTATGAACTGTACTAGGAAATCACTGCCTAGGCAA |
| | | | | AACTCCACAATTTACAATGACATTGCATGGTTTTATTTT |
| | | | | CTTGTGCATAAATTTGGTCACATCAGAAGTGCCATCCAT |
| | | | | CTAAAAAATCGGCGAAAATTGAGAACATAGGCAGCTTAA |
| | | | | TGACAGCGGTTTGGCAATAAGCATTTTTTGCAGACGATT |
| | | | | CTTGCTTTGCTTCTTTTAGCCCTTTTTATTGTTATATAC |
| | | | | CCTGCCAAATGTCGCATCAGGATATCTGCTGCCAAATGT |
| | | | | TGCATCAGGATATGGATCGTGGTTTTACTGAGCATACTT |
| | | | | CACTGATGTAATTGAAAACTGTCAGTTCAAACTTCATAA |
| | | | | AAGTTGTAGTAATGGCTTCCTAACAAGCCCTCCCTTGCT |
| | | | | CTGGAATTTACAATTGACAGGTCCCCTGGAAATGCCTAT |
| | | | | GTCGAAGGTGATGCCTCAAGTGCGAGCTATTTCTTGGCT |
| | | | | GGCGCTGCAATCACTGGAGGAACTGTGACTGTCCAAGGT |
| | | | | TGCGGCACCACCAGTTTGCAGGTAGAACTGTACTATCAG |
| | | | | TTTTTACCATTGGTTAAGCATACTTGCAGTATAACATAA |
| | | | | TCAAAGATATACTGCTGTCAACCAAACATGCTTTAAGTG |
| | | | | GACATTCATTTATGAATCTATAATATAACTACAGTACCG |
| | | | | TAATTTGGTTTTCTTGTGCTATATCCCTGATGATGCCTA |
| | | | | ATATTGCAGGGTGATGTGAAATTTGCTGAGGTACTAGAA |
| | | | | ATGATGGGAGCAAAGGTTACATGGACCGACACTAGTGTA |
| | | | | ACTGTTACTGGTCCACCGCGTCAGCCCTTTGGACGGAAA |
| | | | | CACCTTAAAGCTGTTGATGTCAACATGAACAAAATGCCT |
| | | | | GATGTTGCCATGACTCTTGCCGTCGTTGCCCTTTTTGCC |
| | | | | GATGGTCCAACTGCTATCAGAGATGGTAAACCGTCTTAT |
| | | | | GTGTTGCTGTTGATTTCATTTGGATGGATTTAGCTACAG |
| | | | | CGCATGATTTGTTGCTGACACTTGTCCATTCTCCTCTGC |
| | | | | AGTTGCCTCCTGGAGAGTGAAGGAAACCGAGAGAATGGT |
| | | | | GGCAATCCGGACGGAACTAACAAAGGTAGCACACCTATC |
| | | | | TCCACTTCTTATATTTCAGCTCACTGTTGCACTCCCCAG |
| | | | | TGCTTAGTCTCACCTGTTGTGTGCCTCGTGCTATAGCTG |
| | | | | GGAGCAACGGTAGAGGAAGGCCCGGACTACTGCATTATC |
| | | | | ACACCACCAGAGAAGCTGAACGTCACGGCGATCGACACC |
| | | | | TACGATGACCACCGGATGGCGATGGCCTTCTCCCTTGCC |
| | | | | GCTTGTGCTGAGGTGCCTGTCACGATCAGGGACCCCGGG |
| | | | | TGCACCCGCAAGACCTTCCCCAACTACTTTGACGTGCTA |
| | | | | AGCACCTTCGTGAAGAACTAGCTCCTTTTGTAGCCTGTC |
| | | | | CATGGTTTGAGGAAATTTTTACTGTTTTGGTCCTTCTTG |
| | | | | CGAAATGATTTATGAGTCTGTAATACTAGTTTTGTAGCA |
| | | | | TGTCGTGGGCCTTTTGAGGTAAAATGAGTTGTAATGCAT |
| | | | | ACCGAGTTCGTTTTGAATAAGAAGCAAGTTAGGCGTACC |
| | | | | ATACTGTGATCTAGATGTTCGTCTTTCGTTTCCAGAAAT |
| | | | | ATTATGTTGGCTGCTGGTACTCGAGTGTGTTCGAAAACA |
| | | | | ACATGATAGCCATGGGATTTGGGAGATGACATGTGGGTA |
| | | | | TGTGGCTACTTGAGGAAGATCTTCATCAAAGCAACCAAG |
| | | | | AACACCAGCCGATGGTAAAACAGTGCAGCTTGCACGAAG |
| | | | | AACGTTTGCCTACACTGCTTGGTAAAAGCGAAGGTTTGG |
| | | | | TTTGATAAATTTCTCAGCAGTATTTTGTAATGCTTCGAT |
| | | | | GGTAATTCTTCTACGCAAACCATCAGCCTCAATAGTAAT |
| | | | | CCTGTGCAGTATTTTTTTAGTAGCCCTCGGCACGCTTGA |
| | | | | ACTGTAATTCTTCAACTAAAAACTCAGCTTGAAAATAAT |
| | | | | TATTCGTTGTTAATTGTTCAACAATAATTTTCCTAGCGC |
| | | | | TTAATTGGTGAGAGGTAATTCTCAGCAGCAGTAATTCTC |
| | | | | CCAATGCAAAATCTTTAACTCCAATTGGAGCGGCTTCTC |
| | | | | CACACTCCACCGTGCTTCACTGTAGAGCTTCATCTTTTA |
| | | | | CCAACCTGGACCCGCGGAACAAGAAGGTCATGGTTACAT |
| | | | | GGACCATGGTACAGGAAACAGAGCAGGCCACACGAGACA |
| | | | | CGACTATAGCAGCACATCGTTGGTTCCCCACAACCGATT |
| | | | | CCAGCGACTGGCCTGGCGGCGCGCATGTAGAGCAGGCGA |
| | | | | CCGGTGAGACACAACGGTACTTCACCGGCGGCTCCTATG |
| | | | | GATTTCACATGGAGGCTGTGAGCAGGTAAGTGCGTGTTT |
| | | | | TTTTCTCGATTGGAAACTATGGGTGAGAAATTTGTCCCC |
| | | | | AATTATGGCGGGCGGCCGATTATTTCTGCCATTGCGGTG |
| | | | | CGCCAATCTACGAGGGCACAGTTGTTGTGCCTGAAAATG |
| | | | | GTGCAAATCCATCCGTGATGCAGTGCTGGAAGGCGGTGC |
| | | | | CTGCAGCCATGTCGGGTCAGTTGAGCCAGATCCATCCGT |
| | | | | GGCGGGCATCTTGCAAGTGCTACCTAGCAGGTGCCGACA |
| | | | | ACGGAAAAGGGGACGGGGAGGCCGATTCAACGCAGTGCA |
| | | | | CCATGAATCAGACATCGATGGACCGCGCCAAGAGGTAAA |
| | | | | AAAGTAAATCATATTCGTAATTTCTGAAATTTTGGAAAA |
| | | | | TGTCAGTCATTGTGTAGGTGGATAACATATAAAAAGCAG |
| | | | | CCCAGGAATCTGAGTTTGGTAGACCGGTGTAAGCAACAC |
| | | | | ATGAGAATTGGCCAGGATAAAAGAAAAATCATGTCGATT |
| | | | | TGAGTAAGCTGATCGTCCATGGTCAGTTAAAGAATTGTT |
| | | | | ATTGTGAATGATGCAGTGATGTGAAGTTAGTGAACATTA |
| | | | | GAAGGGGTTGTGCGTTGTAGTTAAAGTTCAAATTTAGCT |
| | | | | GGAAATGGCATGAATCTGAGCCAGGTTGTGAACTCCTGA |
| | | | | GGTATGAAGTTCTGTATAGAAAAGAAATTGTTCAGTTGT |
| | | | | TGAGTGAACTGGATGTAGGTAAGTGGCAGTGATGATAAG |
| | | | | GTAGAATTTACACATACAAAGATAGCATGAATTTGTAGC |
| | | | | CCTGGCTAGCAGGTTGCCAACAGTTATCAGTTTGTGCAG |
| | | | | TTGCGTGTAAAAAGGAAAAATGATGATGAAAGAATTAGT |
| | | | | ATGAGTGTTCTGTAGACCTAACTAACCTATGGTAGATGT |
| | | | | TGCGAACCTGTGCAGGATAAAGATGGGTCAGGCGCCATC |
| | | | | AGACATGGCGCCATGTCTTTCGAGACCGAGTGCTCTTGA |
| | | | | GAAATCAATATGTGGCTACACAGAAAAGCTAGGTTGGGA |
| | | | | GGGGTGCACATGGAGACACAATGGTTGCCGGTGCAATAG |
| | | | | CGGGTACAGAACAGACACAAAAATACCTTTGATGTTTGC |
| | | | | ATGCATTGGCTGAACAGAATTAGATCACGTATTTGCAGG |
| | | | | GGTTCCAGAAAAAAATGCAGCACACTGAGGCCGAGGGGG |
| | | | | TTGCTGCTGGATTATCATCCGATGAAATATTTACAAGAT |
| | | | | AACTACATGAGCTCTACAGTTTGAACAGTACGTTCCAAT |
| | | | | ATCACTAGTTTTAATAATTTATCCAAACACATCTGTAAA |
| | | | | GAAAATGCAGATAATAACGTTGATCTGACATGTTTGGTC |
| | | | | AGTTCTTGACGTGGACAAGGTAACAAGTGAAACAATAAA |
| | | | | AGGCGCTACAGTCTCGGCACACGCTAGTCGAGTTGCATC |
| | | | | TCTCGGAGGAAAAGGTGCTCCTAAATTTTCAGCAGGTGA |
| | | | | GTTCTCCTTCTGTTTGCAGCACACCTCGTGTTTGTATTC |
| | | | | CCCATGATGGAAAAATTAAGGGGTATGCATGATTTTAAT |
| | | | | TCAGAAAATTGTGTGGCTCCGCAGATGCCCCGTCCAATT |
| | | | | GTGGAGCTGTTGTGATATCGAGGAACTAAAGTGCCAGAA |
| | | | | ATGGATGATGACGTGCTAGATGCTCCAGGGGCTGAAACG |
| | | | | GTGGCGTCAAACCCGTCCATGCCTATCTGAGGTAGGAGA |
| | | | | AACAAACGAGATCACACTGGTTTACCTTTGAATGCACTA |
| | | | | TGCACCGAAGAGAGTTCGGTTTGCATCTGGTGCCACCTC |
| | | | | AGTGGGTGGACAATCTAGCATGAGAGGGTAGGAATCTCA |
| | | | | TGGACGCATGTAATTTTCACAGAGACCTGTGTTTTATGT |
| | | | | TGTGGGGTGTGCAAATTCAGTAACCTAATGATGCCTACT |
| | | | | TTTTGTCAAGAAAAATATAGTTAATGAGTCTGGCTGATC |
| | | | | GTGAGGAACTGACAGCTACCTAATCGGGCAGTGGTAATG |
| | | | | GGTTTAGCTGTGCATATTTGTGATAGTGTGCTCATAGAT |
| | | | | TCTTCTAATTCTGATAATGGTTTACGGTTATCCGTAGGT |
| | | | | CAAGGAGGACATAGTGATAGGGAGTGCAAAGACGACCAG |
| | | | | TACAACTCATCATGGTGCATCAGCAGCAGCTGGTAATTC |
| | | | | ATGAATTTGAGTATATACCTGGGATACAAAAGGTGAGGG |
| | | | | TTGGATAAGTCTTAATGCCATGTTATACTGCGTATTCAG |
| | | | | CAGGTGCAGCGAGTGGCGACGTATCCAGGGGGCGTCGTC |
| | | | | CAGTTGAAGCCTCGGCACTATAACTGGTATGTCGTGCTC |
| | | | | AAGTGGTAATGACATTACTATGTGATGGTGAAAAAACTT |
| | | | | TGCAGTTGAGTGTACTCCGAATCTGATATGGCTAGTTGT |
| | | | | TGCGCACTGTCTGAAAGTTGTGCTTCTACCCTTTGCTGT |
| | | | | AGGTATACGGACTTTCGTTCAGCTTCCAGGCATAGAGAA |
| | | | | GCACATTCGGTGCTCATTCAGATAGACGATAAGGATTGC |
| | | | | GCGAAGAGAGAGCTAGACTAGCAGTTCCCAATCACAGAC |
| | | | | GATGCAGGGGTGCAGCATGATCAGCCAGTCCTTCAATAT |
| | | | | GGATGAGATGGGCGAAGCCATGGATCTCGGGGAATGTAT |
| | | | | CCACAAAGATACCACCCCTGTTCCGCAATGAAGGAGTTC |
| | | | | TAGTCGTGAGCAATGCTACATCTAGGGGCTCGTTTTTAC |
| | | | | AAAATCGAACTTACGGGCTGACGTGGAGAATCATGGAGG |
| | | | | GATTAAGGTTCCTCAAATCAAATCATGGGAGGAGAAAGA |
| | | | | TTTGCACCACCCACGTTCATCCACCTCATCCCGTAAAAC |
| | | | | CACCCCGTAACAAAAATCCCATAGGTGTAGGATTATTGG |
| | | | | TTTATTAATCGGGATACTGACTCCAATACTCACAAATAT |
| | | | | ACGCACATGGGCTTCCATCTGTCTGGGCATGATTGGTCC |
| | | | | AGGACGCGAGTGTAGATGCACCCGGGAGCCAAACCACAT |
| | | | | TTCCTTCTCTCGAAGCTAAAACTCGTTTAGTTTTTCATT |
| | | | | AGTTAGGCTCAGGTTATTCAGATCTTTTTTACGTTGCTA |
| | | | | GCAATGACAATTGTCACAATTCCAAGTGTCATGCAGCAA |
| | | | | AGCAGACGCCACTCTTTCACGCATAGAACAACGATATAA |
| | | | | TCTGCAGAGATACTGCCGAAATGCTAACAATATCAATAG |
| | | | | CAAGCCATATATATAAACTTCCAATCAGATACACCAGAG |
| | | | | AGCAATGAAAATTGGTGATGATGATAACTCAGACGATAG |
| | | | | GGACTCAGAATCGTGATGCAAAGAACCTAGTCATACAAA |
| | | | | AACCGGTCTCATACTAGAAATTCAAAGACATGTCATTCT |
| | | | | CTGGTGTCTCTCCACCTTTTTAATAAACAGATAAAAGGC |
| | | | | ACTGGGTAGGATAACTACTGGTCGGTGATGGTCACTTCG |
| | | | | ACCTCGACACCAGGCTCGATAGTGATAGAGGTGATCTGC |
| | | | | TTCACAACGTCTGGGGAGCTGACAAGGTCAATCACCCTC |
| | | | | TTGTGCACCCGCATCTCGAACCGATCCCAGGTGTTGGTA |
| | | | | CCTGATTTAACAAAACAGAGTTAGCCATTTCATTTTGGA |
| | | | | AGATGATGAAGCTTCAGCATAGCTGCAGGTAATGAATGA |
| | | | | TCTGTGACAGGCTGAGCATCAGTTTTAAAAAGCTCGATT |
| | | | | TTGAAACATCAAATGTATCAGACAAAATCATATGGAATC |
| | | | | ATCATCTGCTCAGCCCATCCACAGGATACATGTTTCCTT |
| | | | | TCCAAAAAAATTAAATCAGGCGTTATTGAACAACAAGAT |
| | | | | CTTACTGCCAGTAGTGCTGGAAGAACCACTAGACGAATT |
| | | | | GTATGTAGAGCAACAAACAAGCATTATACAGGCTAATCA |
| | | | | TCAGTTTTAAAAAGCTCGATTGTGATTCCTCAAAGAAAA |
| | | | | TCTCAGGAATAACTTGGTTTAGCATCATCTGATCAGCCC |
| | | | | GTTACAGAACAAAGGTGTAAAAACTAGCAGCACACACTC |
| | | | | TTAACAGTAGAGACTGGGTTACATAAATGGAGGTAATAT |
| | | | | GTATGAAATACAACTGAGGTATGCTGAGAAGTGTTCATG |
| | | | | TTTAGGATCACAAATAAATCAGCAGATCGCCAGAAGCAA |
| | | | | TGAATGTACTTGCTGCAGATTAGCCCCTAGCTAACTTAC |
| | | | | TAGAAAAACCCAAGCATCAGTTTTAAAAAGCTCGGTTTA |
| | | | | AGATACTTCAACGATGGAACATCTCAGTAGCATCTCCTT |
| | | | | GTAACATCACATGCTCAGTTTACAGTAAACGATTCGCCA |
| | | | | TGTAGACTCCATTTTACTTGAAATCATACCACACTAACA |
| | | | | GAACTACCACGAACATAATAAAAAAGCGATGACATGCTA |
| | | | | AGCATCAGTTTTAAAAAGCTCGATT |
| 107 | Lolium | Genomic | 1093 | GTAGTAGCTGCTGGTGGAAATGCGACGTATGTTTCTTTT |
| | multiflorum | | | TTTTATCCTTACGGGAATAAGTATGAGTTCCGTGGTTAT |
| | | | | GCTTTGAGACTGATGGTTTACGTCTCTCTTCTGAACTTC |
| | | | | AGTTATGTTCTTGATGGAGTACCAAGAATGATGGAGCGT |
| | | | | CCTATCGGTGACTTAGGTGTCGGTTTGAAACAACTAGGT |
| | | | | GCGAGTGTTGATTGTTTCCTCGGCACTGACTGCCCACCT |
| | | | | GTTCGTATCAACGGCATTGGAGGGCTACCTGGTGGCAAG |
| | | | | GTTAGCTTCATGAACTTCCATGTTATACGCTTTTGTACA |
| | | | | AACATTTCACTTGTCTGGAGAAAAAACAAGATTACTGAC |
| | | | | AGAGTGAGAGTAGTACGGTGCAATGCGACCACACAATAA |
| | | | | CTCCAAAATTGCCATAACCAATAGGCCCTTTTTCGTGTA |
| | | | | AAACAGATATGCTGATTGTATTGTGGTCTTAGATCACAT |
| | | | | GGGTCTATCATGAACTAGCACTTAACATTGAACCACATT |
| | | | | CCACAGGTTAAGCTGTCTGGTTCCATCAGCAGCCAATAC |
| | | | | TTGAGTTCCTTGCTGATGGCTGCTCCTTTAGCTCTTGGG |
| | | | | GATGTCGAGATTGAAATCATTGATAAACTGATCTCTGTT |
| | | | | CCTTACGTTGAAATGACATTGAGATTGATGGAGCGTTTT |
| | | | | GGCGTGACGGCAGAGCATTCTGATAGCTGGGACAGATTC |
| | | | | TACATTAAAGGAGGACAGAAGTACAAGTAAGTTTTGAAT |
| | | | | TGTGCTGCTTATTCTAAACATTTGTCCAAACATTTGACT |
| | | | | TCTGGATAAACTAGGGAATTGAGCATTGGAAAGAACTAT |
| | | | | TGGCTGCTCAACTTTATTCATCTGGAAATGACCATACTG |
| | | | | TTATTAGCTAAGTCAAGCTTTACTATGAAATCAGTGACT |
| | | | | CTGCTACTTACAATGCACTGGCTGCACAACTATGTTTTC |
| | | | | TGGTGCATAAACTATAGTCTGCCCAAATAACTACCAAAC |
| | | | | TTGTAGTAGCTATGAACTGTACAAGGAAATCAGTGTGGC |
| | | | | AAAACTCCGCTACTTACAATGGCATTGCATGGTTATATT |
| | | | | TTGTTGTGCATAAACTTGGTCACATCAGAAGTGTCATCC |
| | | | | A |
| 108 | Lolium | Genomic | 983 | CATTGAAAGTTCTATTATTATTTTGAGTTTGCATCTTAT |
| | multiflorum | | | GTTGTTTTTCCTTTGTGATTTTATCCATTTTCTTAACTA |
| | | | | GTTATTCGTTTCCTGAAGTTTTTAGTGTCATAACTCCTA |
| | | | | ATCACAATCATGCTACAGGGCACAACAGTGGTCGACAAC |
| | | | | TTGCTGTATAGTGATGATATTCTTTATATGTTGGACGCT |
| | | | | CTCAGAACTCTTGGTTTAAAAGTGGAGGATGATAGTACA |
| | | | | GCCAAAAGGGCAGTCGTAGAGGGTTGTGGTGGTCTGTTT |
| | | | | CCTGTTGGTAAAGATGGAAAGGAAGAGATTCAACTTTTC |
| | | | | CTTGGTAATGCAGGAACAGCGATGCGCCCATTGACAGCT |
| | | | | GCGGTTGCCGTTGCTGGAGGAAATTCAAGGTTTGTCCAA |
| | | | | TTATATTCTTTATGTGAGTGTTGTTTTTTGTGTTAGTTT |
| | | | | CAATCATGAAGGTACTAGTGCAGAAGCCGTACCCCTGAA |
| | | | | ATTTTCTTATTTTGTATATATCAATTGGTAATTGATGTA |
| | | | | AGATATTTTTCCGAGAGGAATAAAAAACAGGGGGATAGA |
| | | | | GAATATTAAAGTATTGTTCTATCACATTAACTTTTTATC |
| | | | | AAAGGTGTACATTGTGTTTGTGAAGTTTATAGAGCTAAA |
| | | | | GGGATGGAAGGGAAGGGGATTGAAGAAGAGGAGAAAAGA |
| | | | | AGAAGATCCTCCTTTGAATACCAAGGTTTGAACGGAAGG |
| | | | | GAGAAGGAGGAAACTCTAAACAATATGGAGATGAACTGA |
| | | | | TGAAGTTTTTGGATCAGAACCGCTTGAGAATCAGAGTTA |
| | | | | AGCCATGTGAAAGTCTATGAGCATGACTTCACCTGGTTA |
| | | | | ATAATTTTAAGCTCTCAACTTCTCATCCTCTTTTCTTTG |
| | | | | TCGAAAATGTCATGTCTTCATGTGATACGTGCTTACATA |
| | | | | ATCGTTTCTTTTGTAAAGCGATTGTCTCTCCAGATTTCT |
| | | | | CCCCTTACGAAAATAATCCTTGAAGGTTGAAGAAATCCC |
| | | | | TTCATTTC |
| 109 | Lolium | Genomic | 591 | AGTCTACACCAACCCACTTTCTCTTTGCCCACCAAAACT |
| | multiflorum | | | TTGGTTTGGTAAGAACTAAGCCCTCTTCTTTCCCTTCTC |
| | | | | TCTCTTAAAAGCCTAAAATCCACCTAACTTTTTCAGCCA |
| | | | | ACAAACAACGCCAAATTCAGAGGAAGAATAATGGCTCAA |
| | | | | GCTACTACCATCAACAATGGTGTCCATACTGGTCAATTG |
| | | | | CACCATACTTTACCCAAAACCCAGTTACCCAAATCTTCA |
| | | | | AAAACTCTTAATTTTGGATCAAACTTGAGAATTTCTCCA |
| | | | | AAGTTCATGTCTTTAACCAATAAAAGAGTTGGTGGGCAA |
| | | | | TCATCAATTGTTCCCAAGATTCAAGCTTCTGTTGCTGCT |
| | | | | GCAGCTGAGAAACCTTCATCTGTCCCAGAAATTGTGTTA |
| | | | | CAACCCATCAAAGAGATCTCTGGTACTGTTCAATTGCCT |
| | | | | GGGTCAAAGTCTTTATCCAATCGAATCCTTCTTTTAGCT |
| | | | | GCTTTGTCTGAGGTATTTATTTCTCAACTGCGAAAACAA |
| | | | | TCTCTATTTGATATTGGAATTTATATTACATACTCCATC |
| | | | | TTGTTGTAATTGCATTAGTACATACTTATGTTTTGACCT |
| | | | | TTGTTC |
| 110 | Lolium | Genomic | 514 | GGGCGGTGCTCTGGAGAAGGTCGTGCTGCAGCCCATCCG |
| | multiflorum | | | GGAGATCTCCGGCGCCGTGCAGCTGCCCGGCTCCAAGTC |
| | | | | GCTCTCCAACCGGATCCTTCTCCTCTCCGCCTTGTCCGA |
| | | | | GGTGAGAAAACAAGCAGACAAAGCCCCTCTCCCTACTTC |
| | | | | TCCCCTTTGTGTGAATTGGGTGCCGAGATGGTTTAGGAG |
| | | | | CACCTTATCATGCTTGGTGCTCGTGAGATCATAAGATTT |
| | | | | TTTTCTTTTTACTTAAAACGATCTAGCCATAGGATTTAG |
| | | | | TTCAAGGTTACTCTTCTTAGTAGCCAATTCCTATATTCG |
| | | | | TTTATCGAATCGTTAGAATTATGTAGTTAGTTGGATCAA |
| | | | | TATTATATGTGGCCTTGGATGAGCAAAAGTCAGTTTATT |
| | | | | CACTTTCCACTCATCGGAATATTATAGTGCAGCATGTCC |
| | | | | TGTCAACTTATTTGCAGTACGATAAGCAATTGAAACTGC |
| | | | | TTTGCTTCGCTGTCATCTCTTGCTGATCATTAACTGGCT |
| | | | | TTTGCTC |
| 111 | Lolium | Genomic | 460 | CAAGATATACAACATGCAAATTTTGCCATCGCAAAAGGT |
| | multiflorum | | | TTTCACGAGCTATAAGGTACTACTAAATCTAGGATCCTC |
| | | | | CTGGGCTTATTCAGTTTAGATCCGTTGGAATATTATAGT |
| | | | | GCAGCATGCCCTGCTAACCTTTGTACAGTAAGATAAGAA |
| | | | | ATTGAAACTGGTTTATTTCGCTGTCGTCTCTTGTTGATC |
| | | | | ATTAACTGGCTTTTGCTCATCAGGGAACAACGGTTGTGG |
| | | | | ATAACCTGTTGAACAGCGAGGATGTCCACTACATGCTCG |
| | | | | AGGCCCTGGACGCGCTTGGGCTCTCAGTGGAAGCAGACA |
| | | | | AAGTTGCAAAAAGAGCTGTAGTCGTCGGCTGCGGCGGCA |
| | | | | GGTTCCCGATTGAAAAGGATGCCAAGGAGGAAGTAAAGC |
| | | | | TCTTCTTGGGCAACGCTGGAACTGCGATGCGGTCATTGA |
| | | | | CGGCAGCTGTAGTAGCTGCTGGTGGAAATGC |
| 112 | Lolium | Genomic | 1377 | ACCTGAATGGGCACTTAGTATTCATGTACCTACATTCAA |
| | multiflorum | | | GACATACAACATGCAAATTTTGTTATCGCAAAAGGTTTT |
| | | | | CACGATCTGTAAGACACTACATCTAGGATCCTCCTGGGC |
| | | | | TTATTCAGTTTCGACCCGTTCGAATGTTATAGTGCAGCA |
| | | | | TGCCCTGTTAACCTTTGTACATCAAGATAAGAAACTGAA |
| | | | | ACCTGTTTACTTCGCTGTCGTCTCTTGCTGATCCTTACT |
| | | | | TTCTCTCATCAGGGAACAACGGTTGTGGATAACCTGTTG |
| | | | | AACAGCGAGGATGTCCACTACATGCTCGAGGCCCTGGAC |
| | | | | GCGCTCGGGCTCTCCGTGGAAGCAGACAAAGTTGCAAAA |
| | | | | AGAGCTGTAGTCGTTGGCTGCGGCGGCAGGTTCCCGATT |
| | | | | GAAAAGGATGCCAAGGAGGAAGTAAAGCTCTTCTTGGGC |
| | | | | AACGCTGGAACTGCAATGCGGCCATTGACGGCAGCTGTA |
| | | | | GTAGCTGCTGGTGGAAATGCGACGTATGTTTCTTTTTTT |
| | | | | TATCCTTACGGGAATAAGTATGAGTTCCGTGGTTATGCT |
| | | | | TTGAGACTGATGGTTTACGTCTCTCTTCTGAACTTCAGT |
| | | | | TATGTTCTTGATGGAGTACCAAGAATGATGGAGCGTCCT |
| | | | | ATCGGTGACTTAGGTGTCGGTTTGAAACAACTAGGTGCG |
| | | | | AGTGTTGATTGTTTCCTCGGCACTGACTGCCCACCTGTT |
| | | | | CGTATCAACGGCATTGGAGGGCTACCTGGTGGCAAGGTT |
| | | | | AGCTTCATGAACTTCCATGTTATACGCTTTTGTACAAAC |
| | | | | ATTTCACTTGTCTGGAGAAAAAACAAGATTACTGAGAGT |
| | | | | AGTATGGTGCAATGCGACCACACAATAAATTTGAAATAG |
| | | | | CCATAACCAATAGGCCCTATTTTGTGTAAACAGATATGC |
| | | | | TGATTGTGTTGTGGTCTTAGATCACACGGTCTATCATAA |
| | | | | ATTAGCACTTAACATTGAACCACATTCCACAGGTTAAGC |
| | | | | TGTCTGGTTCCATCAGCAGCCAATACTTGAGTTCCTTAC |
| | | | | TGATGGCTGCTCCTTTGGCTCTTGGGGATGTTGAGATTG |
| | | | | AAATTATTGATAAACTAATCTCTGTTCCTTACGTTGAAA |
| | | | | TGACATTGAGATTGATGGAGCGTTTTGGTGTGACGGCAG |
| | | | | AGCATTCTGATAGCTGGGATAGATTCTACATTAAAGGAG |
| | | | | GACAGAAGTACAAGTAAGTTTTGAATTGTTCTGCTTATT |
| | | | | CTAAACATTTGTCACATTTGACTTCTGGATAAATTAGAG |
| | | | | AACTGAACATTGGAAAGAACTATTGGCTGCTCAAGTAAC |
| | | | | TGTATTCATCTGGAAATGACGATACTGTTAGTAGCTATG |
| | | | | AAGTCAAGCTTTACTAGGAAATCAGTGCCTAGGCAATCG |
| | | | | ACTCTCCTACTT |
| 113 | Lolium | Genomic | 1107 | CCTACTTACAATGCACTAGCTGCACAGCTATTTTTTTGG |
| | multiflorum | | | TGCATAAACTATTGACTGCTCAAATAACTTTATTCATGT |
| | | | | GGATAGGACCAAACTTTTAGTAGCTATGAACTGTACTAG |
| | | | | GAAATCAGTGCCTACGCAAAACTCCGCTACTTACAATGA |
| | | | | CATTGCACGGTTATATTTTCTTGTGCATAAATTTGGTCA |
| | | | | CATCAGAAGTGCCATCCATCTAAAAAAATCGGCGAAAAT |
| | | | | TGAGAACATAGGCAGCTTAATGACATCGGTGGCAATAAG |
| | | | | CATTTTTTGCAGACGATTCTTGCTTTGCTTCTTTTAGCC |
| | | | | CTTTTTATTGTTATGCCCTGCTGCCAAATGTCGCATCAG |
| | | | | GATATCTGCTGCCAAATGTTGCATCCGCATATGGATCCT |
| | | | | GGTTTTACTGAGCATACTTCACTGATGTAATCGAAAACT |
| | | | | GTCAGTTCAAACTTCATAAAAGTTGTAGTAATCGCTTCC |
| | | | | TAACAAGCCCTCCCTTGCTCTGGAATTTACAATTGACAG |
| | | | | GTCCCCTGGAAATGCCTATGTAGAAGGTGATGCCTCAAG |
| | | | | TGCAAGCTACTTCTTGGCTGGCGCTGCAATCACTGGAGG |
| | | | | AACTGTGACTGTCCAAGGTTGCGGCACCACCAGTTTGCA |
| | | | | GGTAGAACTGTACTGTCAATTTTTACCATTTGGTTAAGC |
| | | | | ATACTTGCAGTATAACATAATCAAAGATATACTGCTGTC |
| | | | | AACCAAACATGCTTTAAGTGGACACTCATTTATGAATCT |
| | | | | ATAATATAACTACAGTACAGTAAGTTGGTTTTCTTGGGC |
| | | | | TATCTACCTGACGATGCTTAATATTGCAGGGTGATGTGA |
| | | | | AATTTGCTGAGGTACTAGAAATGATGGGAGCCAAGGTTA |
| | | | | CATGGACCGACACTAGTGTAACTGTTACTGGCCCAACAC |
| | | | | GTCAGCCCTTTGGAAGGAAACACCTAAAAGCTGTTGATG |
| | | | | TCAACATGAACAAAATGCCTAATGTTGCTATGACTCTTG |
| | | | | CCGTTGTTGCCCTTTTTGCAGATGGTCCAACTGCTATCA |
| | | | | GAGATGGTGAACCCTCTTATGTGTTTCTGTTGATTTCTT |
| | | | | TTGGATGACTTCCGCTACAGCTTAAGATTTGTTCCTGAC |
| | | | | ACTTGTCCATTCTCC |
| 114 | Lolium | Genomic | 480 | CTTGTCCATTCTCCTCTGCAGTTGCCTCCTGGAGAGTGA |
| | multiflorum | | | AGGAAACCGAGAGAATGGTGGCAATCCGTACGGAACTAA |
| | | | | CAAAGGTAGCACACCTGTCTCCACTTCTTATTTTCAGCT |
| | | | | CACTGTTGCACCCCCCCAGTGCTTAGTCTCACCTGTTGT |
| | | | | GTTCCTCGTGCTATAGCTAGGAGCAACGGTAGAGGAAGG |
| | | | | CCCGGACTACTGCATTATCACACCACCAGAGAAGCTGAA |
| | | | | CGTCACGGCGATCGACACCTACGATGACCACCGGATGGC |
| | | | | GATGGCCTTCTCCCTCGCTGCCTGTGCAGAGGTGCCTGT |
| | | | | CACGATCAGGGACCCTGGGTGCACCCGCAAGACCTTCCC |
| | | | | CAACTACTTTGATGTGCTAAGCACCTTCGTGAAGAACTA |
| | | | | GCTCAAGGAAAATCTACAGCATATCGCCTTTGTACTTTT |
| | | | | GTAGCCTGTTGTTCATGGTCTGAGGAATTTTTTACTGTT |
| | | | | TTGATCTTCTTG |
| 115 | Lolium | Genomic | 318 | CCACGTCCGTGGCCGCGCCCGCGGCGCCGGCCGGCGCGG |
| | multiflorum | | | AGGAGGTCGTGCTGCAGCCCATCCGGGAGATCTCCGGCG |
| | | | | CCGTGCAGCTGCCCGGCTCCAAGTCGCTCTCCAACCGGA |
| | | | | TCCTTCTCCTCTCCGCCTTGTCCGAGGTGAGAAAACAAG |
| | | | | CAGACAAAGCCCCTCTCCCTACTTCTCCCCTTTGTGTGA |
| | | | | ATTGGGTGCCGAGATCGGAATATAGCTAGGTGCTTGTGA |
| | | | | AGTCGTGAGATCATAAGATTTTTTTTCCTTTTTACTTAA |
| | | | | AACGATCTAGCCATAGGATTTAGTTCAAGGTTACTCTTC |
| | | | | TTAGTA |
| 116 | Lolium | cDNA | 1284 | CAGCTGCCCGGCTCCAAGTCGCTCTCCAACCGGATCCTC |
| | multiflorum | | | CTCCTCTCCGCCTTGTCCGAGGGAACAACGGTCGTGGAT |
| | | | | AACCTGTTGAACAGCGAGGATGTCCACTACATGCTCGAG |
| | | | | GCCCTGGACGCGCTCGGGCTCTCCGTGGAAGCAGACAAA |
| | | | | GTTGCAAAAAGAGCTGTAGTCGTTGGCTGTGGCGGCAGG |
| | | | | TTCCCGATTGAGAAGGATGCCAAGGAGGAAGTAAAGCTC |
| | | | | TTCTTGGGCAACGCTGGAACTGCAATGCGGCCATTGACG |
| | | | | GCAGCTGTAGTAGCTGCTGGTGGAAATGCAACTTATGTT |
| | | | | CTTGATGGAGTACCAAGAATGAGGGAGCGACCTATCGGT |
| | | | | GACTTAGTTGTCGGTTTGAAACAACTAGGTGCGAATGTT |
| | | | | GATTGTTTCCTCGGCACTGACTGCCCACCTGTTCGGATC |
| | | | | AACGGCATTGGAGGGCTACCTGGTGGCAAGGTTAAGCTG |
| | | | | TCTGGTTCCATCAGCAGCCAATACTTGAGTTCCTTGCTG |
| | | | | ATGGCTGCTCCTTTGGCTCTTGGGGATGTCGAGATTGAA |
| | | | | ATCATTGATAAACTGATCTCTGTTCCTTACGTTGAAATG |
| | | | | ACATTGAGATTGATGGAGCGTTTTGGCGTGACAGCAGAG |
| | | | | CATTCTGATAGCTGGGACAGATTCTACATTAAAGGAGGA |
| | | | | CAGAAGTACAAGTCCCCTGGAAATGCCTATGTCGAAGGT |
| | | | | GATGCCTCAAGTGCGAGCTATTTCTTGGCTGGTGCTGCA |
| | | | | ATCACTGGAGGAACTGTGACTGTCCAAGGTTGCGGCACC |
| | | | | ACCAGTTTGCAGGGTGATGTGAAATTTGCTGAGGTACTA |
| | | | | GAAATGATGGGAGCGAAGGTTACATGGACCGACACTAGT |
| | | | | GTAACTGTTACTGGTCCACCGCGTCAGCCCTTTGGAAGG |
| | | | | AAACACCTAAAAGCTGTTGATGTCAACATGAACAAAATG |
| | | | | CCTGATGTTGCCATGACTCTTGCCGTTGTTGCCCTTTTT |
| | | | | GCTGATGGTCCAACTGCTATCAGAGATGTTGCCTCCTGG |
| | | | | AGAGTGAAGGAAACCGAGAGAATGGTGGCAATCCGGACG |
| | | | | GAACTAACAAAGCTGGGAGCAACGGTAGAGGAAGGCCCG |
| | | | | GACTACTGCATTATCACACCACCAGAGAAGCTGAACGTC |
| | | | | ACGGCGATCGACACCTACGATGACCACCGGATGGCGATG |
| | | | | GCCTTCTCCCTCGCTGCCTGTGCAGAGGTGCCTGTCACG |
| | | | | ATCAGGGACCCTGGGTGCACCCGCAAGACCTTCCCCAAT |
| | | | | TACTTTGACGTGCTAAGCACCTTCGTGAAGAACTAG |
| 117 | Lolium | Genomic | 302 | AAACAACATCATATGGTTTCTTTTGTCTTTATGACTAGA |
| | rigidium | | | CCACTCTTTATTATTCCTTGTATTGGGATCTTATTTTGA |
| | | | | ATGGTTGTTTAGCCTACACCTCATGTTCTAGATTTTGTT |
| | | | | CGTATACCAGACTTTTCTTGATTGCGATCTATTTGTCCC |
| | | | | CTGGATTTTGCATAGGGTGATGTAAAATTTGCCGAAGTT |
| | | | | CTTGAGAAGATGGGTTGCAAGGTCACCTGGACAGTACAA |
| | | | | TAGCGTAACTGTTACTGGACCACCCAGGGAATCATCTGG |
| | | | | AAGGAAACATTTGCGCGCTAATCGACGTC |
| 118 | Sorghum | cDNA | 608 | GAGGAAGTGCAGCTCTTCTTGGGGAATGCTGGAACTGCA |
| | halepense | | | ATGCGGCCATTGACAGCAGCTGTTACTGCTGCTGGTGGA |
| | | | | AATGCAACTTACGTGCTTGATGGAGTACCAAGAATGAGG |
| | | | | GAGAGACCCATTGGTGACTTGGTTGTCGGATTGAAGCAG |
| | | | | CTTGGTGCGGACGTTGATTGTTTCCTTGGCACTGACTGC |
| | | | | CCACCCGTTCGTATCAATGGAATTGGAGGGCTACCTGGC |
| | | | | GGCAAGGTTAAGCTCTCTGGCTCCATCAGCAGTCAGTAC |
| | | | | TTGAGTGCCTTGCTGATGGCTGCTCCTTTGGCTCTTGGG |
| | | | | GATGTGGAGATTGAAATCATTGATAAATTAATCTCCATT |
| | | | | CCCTATGTTGAAATGACATTGAGATTGATGGAGCGTTTT |
| | | | | GGCGTGAAAGCAGAGCATTCTGATAGCTGGGACAGATTC |
| | | | | TACATTAAGGGAGGTCAAAAATACAAGTCCCCCAAAAAT |
| | | | | GCCTATGTTGAAGGTGATGCCTCAAGTGCAAGCTATTTC |
| | | | | TTGGCTGGTGCTGCAATTACTGGAGGGACTGTGACTGTT |
| | | | | GAAGGTTGTGGCACCACCAGTTTGCAGGGTGATGTGAAG |
| | | | | TTTGCTGAGGTACTGGAGATGAT |
| 119 | Lolium | Genomic | 647 | CGCCACGTCCGTGGCCGCGCCCGCGGCGCCGGCCGGCGC |
| | rigidium | | | GGAGGAGGTCGTGCTGCAGCCCATCCGGGAGATCTCCGG |
| | | | | CGCCGTGCAGCTGCCCGGCTCCAAGTCGCTCTCCAACCG |
| | | | | GATCCTTCTCCTCTCCGCCTTGTCCGAGGTGAGAAAACA |
| | | | | AGCAGACAAAGCCCCTCTCCCTACTTCTCCCCTTTGTGT |
| | | | | GAATTGGGTGCCGAGATGGGATTTTAGGAGGGTTAGGTG |
| | | | | CATCTTATCATGCTAGGTGCTCGTGAGATCATAAGATTT |
| | | | | TTTTCTTTTTACTTAAAACGATCTAGCCATAGGATTTAG |
| | | | | TTCAAGGTTACTCTTCTTAGTAGCCAATTCCTATGTTCG |
| | | | | TTTATCGAATCGTTAGAATTATGTAGTTAGTTGGATCAA |
| | | | | TATTATATGAGGCCTTGGATGAGCAAAAGTCAGTTAATG |
| | | | | GTAATTAGAATTATGTAGGACCTGGTGATCCTCTTATGT |
| | | | | CAGTCTGATGGCTTCCTCATGAAAGTATTACGCTGCAAC |
| | | | | GCTGTCATGGACACCTAGTATTCATATACCTGCATTCAA |
| | | | | GATGCACGACTTTCAAATCTTGTTATCGCTAAAGGTTTT |
| | | | | CACAAGCTATAAGATCCTAAATCTAGGATCCCCTCCAGA |
| | | | | GTTTATTCACTTTCCACTCATCG |
| 120 | Lolium | Genomic | 4472 | TCCTCTCCGCCTTGTCCGAGGTGACCAAACAACCCGAAA |
| | rigidium | | | CGCTTCCCCCTCCTCCCCTTCCTTTGGGGTGAATTGGGT |
| | | | | GTACTAAAGATGGGATTTTTGGAGGTTTAGGGGCGCACT |
| | | | | TGTATCTTGTCATGCTAGGTGCTGGCCAGATCATAAGAT |
| | | | | ATTCTTTCATTCTTATTAAGACGATCTAGCCATAAGACA |
| | | | | TATACTTAAGAAGGTAGTCTGTTCAGTAGGCAATTCATA |
| | | | | AGTCTGTTCACCCAATTATTGCATACATACTGTAGCTTG |
| | | | | TATTTGAATGAAGATGATCTCACCATAGGATACTCTACT |
| | | | | CCATTCCAAATAGATTCAAGTTGTATGTGTCCTAATTAA |
| | | | | AACTATTTCTGGTTTCACAGAAAAGTGTGTCACTTTAAT |
| | | | | TTCGTTAGTTTCATCATAAAATATATTTTTTGTACTGTA |
| | | | | CTATAGAGATTTGATGTTGTATATATTATCATTTTTCTC |
| | | | | GTCTACAAACTGGGTCAAACGTAGACAAGGTTGACACAG |
| | | | | GACAAACATAAGACTTCGATTAATTTGGAACCGAGGGAG |
| | | | | TGGTATGTTTACCAGACAAATCCTATGTTCGTTTATTGA |
| | | | | ATCATTAGAATTATGTACTAGCTATTAGTTGGATCAAGA |
| | | | | TGATACATAAGGTTAAAAGGTATTAGTATAATCAGGTGA |
| | | | | TCCTTAGGCTGGTCTTTTTTTTTTCTTCTGATGGCTTCT |
| | | | | TTATGAAAGATTTGTATTGCAATGGTGTCGTGGACACTT |
| | | | | GATAAGAAACTGAAACTGGTTTACTTTGCTGGCATCTCT |
| | | | | AGTTGATCGTTAGCTGACTATTTTGCTCTTCAGGGAACA |
| | | | | ACGGTGGTGGATAACCTGTTGAACAGTGAGGATGTCCAC |
| | | | | TACATGCTCGAGGCCCTGGACGCGCTCGGGCTCTCCGTG |
| | | | | GAAGCAGACAAAGTTGCAAAAAGAGCTCTAGTCGTCGGC |
| | | | | TGTGGCGGCAGGTTCCCGATTGAGAAGGATGCCAAGGAG |
| | | | | GAAGTAAAGCTCTTCTTGGGCAACGCTGGAACTGCGATG |
| | | | | CGGCCATTGACGGCGGCTGTAGTAGCTGCTGGTGGAAAT |
| | | | | GCAACGTATGTTTCTTTTCTTTAATCCTTATTATGGGAA |
| | | | | TAAGTATGAGTTCCGTGGTTATGCTTTGAGACTGATGGT |
| | | | | TTATGTCTCTCTTCTGAACTTCAGTTATGTTCTTGATGG |
| | | | | AGTACCAAGAATGAGGGAGCGACCTATCGGTGACTTAGT |
| | | | | TGTCGGTTTGAAACAACTAGGTGCGAATGTTGATTGTTT |
| | | | | CCTCGGCACCGACTGCCCACCTGTTCGGATCAACGGCAT |
| | | | | TGGAGGGCTACCTGGTGGCAAGGTTAGCCTCATCAACTT |
| | | | | CCCTTTTATGCGCTTTTGTACACACATTTCAGTTCTCTG |
| | | | | AAAAAAACAAGATTATGCGACCTTTAAAATAGCCATAAC |
| | | | | CATTAGGCCCTATTTCGTGTAAAACAGATATGCTGATTG |
| | | | | TGTTGTGGTCTTAGATCACACGGCCTATCATAAATTAGC |
| | | | | ACTTAACATTGAATTGCATTCCACAGGTTAAGCTATCTG |
| | | | | GTTCCATCAGCAGCCAGTACTTGAGTTCCTTGCTGATGG |
| | | | | CTGCTCCTTTGGCTCTTGGGGATGTTGAGATTGAAATCA |
| | | | | TTGATAAACTAATCTCTGTTCCTTATGTTGAAATGACAT |
| | | | | TGAGATTGATGGAGCGTTTTGGCGTGACGGCAGAGCATT |
| | | | | CTGATAGCTGGGACAGATTCTACATTAAAGGAGGACAGA |
| | | | | AGTACAAGTAAGTTTTGAATTGTTCTGCTTATTCTAAAC |
| | | | | ATTTGTCCAAACATTTGACTTCTGGATAAACTAGGGAAT |
| | | | | TGAACATTGGAAAGAACTATTGACTGCTCAACTTACTGT |
| | | | | TATTAGCTAAGTCAAGCTTTACTAGGAAATGAGTAACTC |
| | | | | TGCTACTTACAATGCACTGGCTGCACAGCTATGTTTTCT |
| | | | | GGTGCATAAACTATTGTCTGCCCAAATAACTTTAATCAT |
| | | | | CTGGTTAGGACCAAACTTGTAGTAGTTATGAACTGTACA |
| | | | | AGGAAATCAGTGTGACAAATCTCCGCTACTTACAATGAC |
| | | | | ATTGGACGGTTATATTTTCTTGTGCATAAACTTGGTCAC |
| | | | | ATCAGAAGTGCCATCCATCTAAAAAAGGGTGAGAATTGA |
| | | | | GAACATATGCAGCTTAATGACAGCTGTTTGGCAATAAGC |
| | | | | ATTTCTTTTGCGGATGATTCTTGATTTGCTTCTTTTAGC |
| | | | | CTTTTTTATTGTTACTAGTTGAATGTCCGTGCTTCGCCA |
| | | | | CGGCTCCTTAGTGTATATTTAATGGCATTCGTGTTATAC |
| | | | | GGATAAAGATACTATGTATGTAAATATTGAAAGTACTTT |
| | | | | TTTTGGACCCCCTTCCGGCATGTTCTATTGTCTTCATCG |
| | | | | TCGAAGCCAAATGTTACATTGGGATATCTGCTGCCAAAT |
| | | | | GTTGCAGCAGGATATGCATCCTGATTTTACTGAGCATAC |
| | | | | TTCACTGATGTAATTGAAACTGTCAGTTCAAACTTCATA |
| | | | | AAAGTTGCAGTAATCGCTTCCTAAACAAGCCCTCCCTTG |
| | | | | CTCTGGAATTGACAATTGACAGGTCCCCTGGAAATGCCT |
| | | | | ATGTCGAAGGTGATGCCTCAAGTGCGAGCTATTTCTTGG |
| | | | | CTGGCGCTGCAATCACTGGAGGAACTGTGACTGTCCAAG |
| | | | | GTTGCGGCACCACCAGTTTGCAGGTACAACCAGTTTTAA |
| | | | | CCATTTGGTTAAGCATACTTGCGGTATATAACATAATCA |
| | | | | AAGATATACTGCTGTCAACCAAACTGATTTAAGTGGACA |
| | | | | TTCATTTATGAATCTATATAACTACAGTACTGTAAGTCG |
| | | | | GTTTCTTGTGCTATCTCCCTGACGATGATTAATATTGCA |
| | | | | GGGTGATGTGAAATTTGCTGAGGTACTAGAAATGATGGG |
| | | | | AGCGAAAGTTACATGGACCGACACTAGTGTAACTGTTAC |
| | | | | TGGTCCACCACGTCAGCCCTTTGGAAGGAAACACCTAAA |
| | | | | AGCTGTTGATGTCAACATGAACAAAATGCCTGATGTTGC |
| | | | | CATGACTCTTGCCGTTGTTGCCCTTTTTGCCGATGGTCC |
| | | | | AACTGCTATCAGAGATGGTAAACCCTCTTATGTGTTGCT |
| | | | | GTTGATTTCTTTTGGATGGATTCCGCTACAGCACATGAT |
| | | | | TTGTTCCTGACACTTGTCCATTCTCCTCTGTAGTTGCCT |
| | | | | CTTGGAGAGTGAAGGAAACCGAGAGAATGGTGGCAATCC |
| | | | | GGACGGAACTAACAAAGGTAGCACACCTATCTCCACTTC |
| | | | | TTATATTTCAGCTCACTGTTGCACTCCCCAGTGCTTAGT |
| | | | | CTCACCTGTTGTGTGCCTCTGTGCTATAGCTGGGAGCAA |
| | | | | CGGTAGAGGAAGGCCCAGACTACTGCATTATCACACCAC |
| | | | | CAGAGAAGCTGAACGTCACGGCAATCGACACCTACGATG |
| | | | | ACCACCGGATGGCGATGGCCTTCTCCCTCGCCGCCTGCG |
| | | | | CTGAGGTGCCTGTCACGATCAGGGACCCTGGGTGCACCC |
| | | | | GCAAGACCTTCCCCAACTACTTTGACGTGCTAAGCACCT |
| | | | | TCGTGAAGAACTAGCTCGATGAAAATCTACAGTGTATCG |
| | | | | CATTTGTACTTTTGTAGCCTGTCCATGGTCCGAGGAAAT |
| | | | | TTTTACTGTTTTGGTCTTCTTGCGAAATGATTTATGAGT |
| | | | | GTAATACTAGTTTTGTAGCATGGCGTGGGGCTTTTGAGG |
| | | | | TAAAATGAGTTGTATGCATACTGAGTTCGTTTTGAATAA |
| | | | | GAAGCAAGTTAGGAGTACCATAGACCATACTGTGACCTA |
| | | | | CATGTTCTTCCGTTTCCAGAGGTATTATGTTGGCTGCTG |
| | | | | GTACTCAAGTGTGTTCGAAAACTACTCGACAGCCATGGA |
| | | | | ATTTGGGAGATGCCATTTGGGTATGTGGATGCTTGAGGA |
| | | | | AGATCATCAAAGCAAACAAGAACACCAGTCGATGGTAAA |
| | | | | ACAGTGCAGCTTGCACCAAGAATGTTTGCCTATCAGAGT |
| | | | | AAACAAACCAGACTCAGCAGATATGAAAAAAACTCAGCA |
| | | | | CTGTGACACTCGTGCTAAAACTAATTTCATTTAGGCCGT |
| | | | | GGAGTAGGCCATTGCATACTTACGTATTAGAGCATCTCT |
| | | | | AGTCGAGTCCTAGAGCATCTCTAGTCGAGTCCCCACAAA |
| | | | | CGGCGCCGGATCGAGCGCTTGGGGGACGAGTTTTGTTCG |
| | | | | TGCCGTGTTTGGGGTACATCGCTCCCTAGTCGCGTCCCC |
| | | | | CAAACGCCGTCCCCAATGAGGAATTCAAAATAGTTTGTG |
| | | | | CATTTAAAAAAGATGGTGTTCGTCGAAGTCGTCGCGATC |
| | | | | AAAGTACTTGGCGCGCGATCATATTACAGGCCGACTTGC |
| | | | | ACAAACATAGATCCTCCAGAACGGTCCACTTGGGACAGT |
| | | | | GTGCCCTACGCCTTCTTCTTCTTTTCCTCCGGACCGGGT |
| | | | | CCTGGCTCGTACGTCGGGGAGTAGAACATAGCGTTGGGG |
| | | | | TTGAAGCCGTCACGAGGCAGCGCATCCTCGTACCGCGGC |
| | | | | AACAAGTTTGGTGTCACGCACCCGGGAGTGGCGGAGGGG |
| | | | | CCGTCGTTGTAGAACCCGGATGTCGA |

The application's sequence listing, which the Patent Office published only in electronic form, follows.

SEQUENCE LISTING (3789 sequences)

SEQ ID NO: 1 - DNA, 1362 bp, Agrobacterium tumefaciens
cacggtgcaagcagccggcccgcaaccgcccgcaaatcctctggcctttccggaaccgtccgcattcccggcgacaagtcgatctcccaccggtccttcatgttcggcggtctcgcgagcggtgaaacgcgcatcaccggccttctggaaggcgaggacgtcatcaatacgggcaaggccatgcaggccatgggcgccaggatccgtaaggaaggcgacacctggatcatcgatggcgtcggcaatggcggcctcctggcgcctgaggcgccgctcgatttcggcaatgccgccacgggctgccgcctgaccatgggcctcgtcggggtctacgatttcgacagcaccttcatcggcgacgcctcgctcacaaagcgcccgatgggccgcgtgttgaacccgctgcgcgaaatgggcgtgcaggtgaaatcggaagacggtgaccgtcttcccgttaccttgcgcgggccgaagacgccgacgccgatcacctaccgcgtgccgatggcctccgcacaggtgaagtccgccgtgctgctcgccggcctcaacacgcccggcatcacgacggtcatcgagccgatcatgacgcgcgatcatacggaaaagatgctgcagggctttggcgccaaccttaccgtcgagacggatgcggacggcgtgcgcaccatccgcctggaaggccgcggcaagctcaccggccaagtcatcgacgtgccgggcgacccgtcctcgacggccttcccgctggttgcggccctgcttgttccgggctccgacgtcaccatcctcaacgtgctgatgaaccccacccgcaccggcctcatcctgacgctgcaggaaatgggcgccgacatcgaagtcatcaacccgcgccttgccggcggcgaagacgtggcggacctgcgcgttcgctcctccacgctgaagggcgtcacggtgccggaagaccgcgcgccttcgatgatcgacgaatatccgattctcgctgtcgccgccgccttcgcggaaggggcgaccgtgatgaacggtctggaagaactccgcgtcaaggaaagcgaccgcctctcggccgtcgccaatggcctcaagctcaatggcgtggattgcgatgagggcgagacgtcgctcgtcgtgcgtggccgccctgacggcaaggggctcggcaacgcctcgggcgccgccgtcgccacccatctcgatcaccgcatcgccatgagcttcctcgtcatgggcctcgtgtcggaaaaccctgtcacggtggacgatgccacgatgatcgccacgagcttcccggagttcatggacctgatggccgggctgggcgcgaagatcgaactctccgatacgaaggctgcctga

SEQ ID NO: 2 - DNA, 1622 bp, Abutilon theophrasti
ttcagtttcattcagatcaaatctcaaaggaggtttttccaattcccggggtttgtgtttgaacagcaatggtaagttgggaacaatcaaggttcggccaggagtggtttctgcttcaacagcagccacggctgagaagccatccagcgcatccgaaattgtgcttcaaccaatcaatgaaatttcgggtactgttaaattacccggctctaaatcactctccaatcggattctgctcctagctgctctatccgagggaactactgtggttgacaatttgttgaatagcgacgatgttcatcacatgcttgtcgctttgggaaaacttggccttcgtgtggagcatgacagtgaaaagaaacgagccattgttgaaggctgcggtggtcaatttccagtagggaaaggggaaggtcaagaaattgagcttttcctcgggaatgctggaaccgcaatgcgacctcttactgctgctattaccgccgccggtggcaattcaagctacgtacttgatggtgtaccccgaatgagagagaggccaattggggacttagttactggtcttaagcagctgggtgcagatgtcgattgtactcttggcacaaattgcccccctgtccgtataaatggaaagggtggtcttcctggaggaaaggtgaaactttcaggatctatcagtagtcaatacttgaccgctttactcatggcagctcctttggctcttggggatgtggaaattgagattattgataaactgatttcaatcccatatgttgaaatgaccataaaattgatggaaaggtttggggtcagtgtggagcacagtaatagctgggatcgattctttatccgaggaggtcaaaagtacaagtctcctggaaatgcttacgtcgaaggtgacgcttcaagtgctagttacttccttgctggtgcagctgttactggtgggactgtcacagtagaaggatgtggaacaagtagtttgcagggtgatgtaaaattcgctgaggttcttgagatgatgggtgccaaagttacttggaccgagaacagtgtaaccgtcactggacccccaagaaattcctttgggaggaagcaattgcgtgctattgatgtcaacatgaacaaaatgccagatgttgccatgactctcgctgttgttgccctttacgctgatggtcccactgccataagagatgtggcaagttggagggtgaaagagactgaaaggatgattgctatatgcacagaactcaggaagctcggagcaacagttgaagaagggccagattattgcgtcatcactccaccggagaaattaaacgtgacagcaatagatacttatgatgatcaccgaatggccatggcattctctcttgccgcctgtgcagaggttccagttaccatcaatgatcctggttgtacccggaaaaccttccctgactactttgaagttctcgagagggttacaaagcattgaatggctcgttttacttcgttatacaagagaaagaaacaaagcatgagagataggttcgtaccactgttcttaaaatcaaaggctgaaatcagttgaaccttgtcttcaatgttgtctcctgatctgataatttctcatcggc

SEQ ID NO: 3 - DNA, 958 bp, Amaranthus graecizans
gcgcccattgacagctgcggttgccgttgctggaggaaattcaagttatgtgcttgatggagtaccaagaatgagggagcgccccattggggatctggtagcaggtctaaagcaacttggttcagatgttgactgttttcttggcacaaattgccctcctgttcgggtcaatgctaaaggaggccttccagggggcaaggtcaagctctctggatcagttagtagccaatatttaactgcacttctcatggctactcctttgggtgttggagacgtggagattgagatagttgataaattgatttctgtaccgtatgttgaaatgacaataaggttgatggaacgctttggagtatctgttgaacatagtgatagttgggacaggttctacatccgaggtggtcagaaatacaaatctcccggaaaggcatatgttgagggtgatgcttcaagtgctagctactttctagcaggagccgccgtcactggtgggactgtgactgtaaagggttgtggaacaagcagtttacagggtgatgtaaaatttgctgaagttcttgaaaagatgggttgcaaggtcacctggacagagaatagcgtaactgttaccggaccacccagggattcatctggaagaaaacatctgcgcgctatcgacgtcaacatgaacaaaatgccagatgttgctatgactcttgcagttgttgccttgtatgcagatgggcccaccgccatcagagatgtggctagctggagagtgaaggaaaccgaacggatgattgccatttgcacagaactgagaaagcttggggcaacagttgaggaaggatctgatttctgtgtgatcactccgcctgaaaagctaaatcctaccgccatcgaaacttatgacgatcaccgaatggccatggcattctctcttgctgcctgtgcagatgttcccgtcactatccttgat

SEQ ID NO: 4 - DNA, 490 bp, Amaranthus graecizans
gagccaagaaacaacgcgaaattcagagataaagagaaagaataatggctcaagctactaccatcaacaatggtgtccaaactggtcaattgcaccatactttacccaaaacccacttacccaaatcttcaaaaactgttaattttggatcaaacttgagattttctccaaagttcatgtctttaaccaataaaagagttggtgggcaatcatcaattgttcccaggattcaagctactgttgctgctgcatctgagaagccttcatctgccccagaaattgtgttacaacccatcaaagagatctccggtactgttcaattgcctgggtcaaagtctttatccaatcgaatccttcttttagctgctttgtctgagggcacaacattggtcgacaacttgctgtatagtgatgatattcgttatatgctggacgctctcagagctcttggtttaaaagtggaggatgataatacagccaaaagggcagt

SEQ ID NO: 5 - DNA, 1682 bp, Amaranthus hybridus
ctaagccctcgtctttcccttctctctctcttaaaatcttaaaatccacccaactttttcagccaacaaacaacgccaaattcagagaaagaataatggctcaagctactaccatcaacaatggtgtccaaactggtcaattgcaccatattttacccaaaacccacttacccaaatcttcaaaaactcttaattttggatcaaacttgagaatttctccaaagttcatgtctttgaccaataaaagagttggtgggcaatcatcaattgttcccaagattcaagcttctgttgctgctgcagctgagaagccttcatctgtcccagaaattgttttacaacccatcaaagagatctctggtactgttcaattgcctgggtcaaagtctttatccaatcgaatccttcttttagctgctttgtctgagggcacaacagtggtcgacaacttgctgtatagtgatgatattctttatatgttggatgctctcagaactcttggtttaaaagtggaggatgataatacagccaaaagggcagtcgtggagggttgtggtggtctgtttcctgttggtaaagatggaaaggaagagattcaacttttccttggtaatgcaggaacagcgatgcgcccattgacagctgcggttgccgttgctggaggaaattctagttatgtgcttgatggagtgccaagaatgagggagcgccccattggggatctggtagcaggtctaaagcaacttggttcagatgttgactgttttcttggcacaaattgccctcctgttcgggttaatgctaaaggaggccttccagggggcaaggtcaagctctctggatcggttagtagccaatatttaactgcacttctcatggctactcctttgggtcttggagacgtggagattgagatagttgataaattgatttctgtaccgtatgttgaaatgacaataaggttgatggaacgctttggagtatctgtagaacatagtgatagttgggacaggttctacatacgaggtggtcaaaaatacaaatctcctggaaaggcatatgttgagggtgacgcttcaagtgctagctacttcctagctggagccgccgtcactggtgggactgtgactgtcaagggttgtggaacaagcagtttacagggtgatgtaaaatttgccgaagttcttgagaagatgggctgcaaggtcacctggacagagaatagcgtaactgttacgggaccacccagggattcatctggaaggaaacatctgcgcgctgtcgacgtcaacatgaacaaaatgccagatgttgctatgactcttgcagtagttgccttgtatgctgatgggcccactgccatcagagatgtggctagctggagagtgaaggaaaccgaacggatgattgccatttgcacagaactgagaaagcttggggcaacagttgaggaaggatctgattactgtgtgatcactccgcctgaaaagctaaatcccaccgccatcgaaacttatgacgatcaccgaatggccatggcattctctcttgctgcctgtgcagatgttcccgtcactatccttgatccgggatgcacccgtaaaaccttcccggactactttgaagttttagaaaagttcgccaagcattgagtaacatatgggttctttaaattgtacgcc

SEQ ID NO: 6 - DNA, 843 bp, Amaranthus lividus
gagggttgtggtggtctgtttcctgtttggtaaagatggaaaggaagagattcaacttttccttggtaatgcaggaacagcgatgcgcccattgacagctgcggttgccgttgctggaggaaattctagttatgtgcttgatggagtgccaagaatgagggagcgccccattggggatctggtagcaggtctaaagcaacttggttcagatgttgactgttttcttggcacaaattgccctcctgttcgggttaatgctaaaggaggccttccagggggcaaggtcaagctctctggatcggttagtagccaatatttaactgcacttctcatggctactcctttgggtcttggagacgtggagattgagatagttgataaattgatttctgtaccgtatgttgaaatgacaataaggttgatggaacgctttggagtatctgtagaacatagtgatagttgggacaggttctacatacgaggtggtcaaaaatacaaatctcctggaaaggcatatgttgagggtgacgcttcaagtgctagctacttcctagctggagccgccgtcactggtgggactgtgactgtcaagggttgtggaacaagcagtttacagggtgatgtaaaatttgccgaagttcttgagaagatgggctgcaaggtcacctggacagagaatagcgtaactgttacgggaccacccagggattcatctggaaggaaacatctgcgcgctgtcgacgtcaacatgaacaaaatgccagatgttgctatgactcttgcagtagttgccttgtatgctgatgggcccactgccatcagagatgtggctagctggagagt

SEQ ID NO: 7 - DNA, 1554 bp, Amaranthus palmeri
atggctcaagctactaccatcaacaatggtgtccatactggtcaattgcaccatactttacccaaaacccagttacccaaatcttcaaaaactcttaattttggatcaaacttgagaatttctccaaagttcatgtctttaaccaataaaagagttggtgggcaatcatcaattgttcccaagattcaagcttctgttgctgctgcagctgagaaaccttcatctgtcccagaaattgtgttacaacccatcaaagagatctctggtactgttcaattgcctgggtcaaagtctttatccaatcgaatccttcttttagctgctttgtctgagggcacaacagtggtcgacaacttgctgtatagtgatgatattctttatatgttggacgctctcagaactcttggtttaaaagtggaggatgatagtacagccaaaagggcagtcgtagagggttgtggtggtctgtttcctgttggtaaagatggaaaggaagagattcaacttttccttggtaatgcaggaacagcgatgcgcccattgacagctgcggttgccgttgctggaggaaattcaagttatgtgcttgatggagtaccaagaatgagggagcgccccattggggatctggtagcaggtctaaagcaacttggttcagatgtagattgttttcttggcacaaattgccctcctgttcgggtcaatgctaaaggaggccttccagggggcaaggtcaagctctctggatcggttagtagccaatatttaactgcacttctcatggctactcctttgggtcttggagacgtggagattgagatagttgataaattgatttctgtaccgtatgttgaaatgacaataaagttgatggaacgctttggagtatccgtagaacatagtgatagttgggacaggttctacattcgaggtggtcagaaatacaaatctcctggaaaggcatatgttgagggtgatgcttcaagtgctagctacttcctagccggagccgccgtcactggtgggactgtcactgtcaagggttgtggaacaagcagtttacagggtgatgtaaaatttgccgaagttcttgagaagatgggttgcaaggtcacctggacagagaatagtgtaactgttactggaccacccagggattcatctggaaagaaacatctgcgtgctatcgacgtcaacatgaacaaaatgccagatgttgctatgactcttgcagttgttgccttgtatgcagatgggcccaccgccatcagagatgtggctagctggagagtgaaggaaaccgaacggatgattgccatttgcacagaactgagaaagcttggggcaacagttgaggaaggatctgattactgtgtgatcactccgcctgaaaagctaaaccccaccgccattgaaacttatgacgatcaccgaatggccatggcattctctcttgctgcctgtgcagatgttcccgtcactatccttgatccgggatgcacccgtaaaaccttcccggactactttgatgttttagaaaagttcgccaagcat

SEQ ID NO: 8 - DNA, 18729 bp, Amaranthus palmeri
cccaaatgaaatttgacctattttagtaggttatcttcttcaatgtcttcttcaatgcctctttataaacccagctactgatttgtatcccacaagccattgttcttcttcaatttattccactttgttcttcaatcttcacctttcttcttccattgtgttcttccttcttcactattaaccctacgcaagccctcttcaaatgtattacaattttgaatcaaataatacaattgatgctcataattaacaccaagactagtgaccaccaaatcattaagatcaaaccatgaaatgcaatcaggatcaagtgaaaggcttctatattccccacccacataattcaaccctaccccagtccttttgaatttacccccataccaaaacatcacttgaaatttttcaaaattattaacctaaaaaaacaacacaattgaacataattaccaatgcatttctataacaacaaagaaaacattaaagaatcaaagattaaagtgaggaatggcaaagaaattaccatggtttgattgagaacaagaagacccaaaattcgtctgcacagccccaaaattttcgcacagagcagcaataccacccccaaaattcgacactgttgataaaaaataaaccctaatttttttgggaaattacagttgatgaatgtgagtgttgattatggcgtgaagcttgatgattatgaatgacaattgtgcttcaagtttttgaaattttgaagttttgaaggaagatggtgtgaaggaatggtagaacaggaaatgaagttaagggtatgcctttttgggttgaatgtttattttatggaattaaagaatatgaaagatcatactctaacctgcaatagtaggtcaaatttcatttgggggtgccacgagcaaatacacttgaaaggtgagattattcataaataatcaatacttgggattattcacataggtttgcgaatagttcggattattcccaacaatttttccttaagattataattaaaaaatccccaaaagatgaaaaaaagagaaagcatgtaaaacacgcgaatcagaccggtccactcttgttttaatttgagacaattttgatgttgagtcatcccacaccaaccccaaaaaattcaacaacaaactcttataatgattccctctactctactagagtctacaccaacccactttctctttgcccaccaaaactttggtttggtaagaactaagccctcttctttcccttctctctcttaaaagcctaaaatccacctaactttttcagccaacaaacaacgccaaattcagaggaagaataatggctcaagctactaccatcaacaatggtgtccatactggtcaattgcaccatactttacccaaaacccagttacccaaatcttcaaaaactcttaattttggatcaaacttgagaatttctccaaagttcatgtctttaaccaataaaagagttggtgggcaatcatcaattgttcccaagattcaagcttctgttgctgctgcagctgagaaaccttcatctgtcccagaaattgtgttacaacccatcaaagagatctctggtactgttcaattgcctgggtcaaagtctttatccaatcgaatccttcttttagctgctttgtctgaggtatttatttctcaactgcgaaaacaatctctatttgatattggaatttatattacatactccatcttgttgtaattgcattagtacatacttatgttttgacctttgttcgtttgtttgttgaattggtagtgttgagaatttgaatctaattatttgtttttccatgtgaatttaatctgattaaatccacttcttatttatgttaagttgcaatgatgtttgccaaacggttatcattgaaggataagttcgcctacttttgaccctcccaacttcgcgttggtagagccattttatgttattgggggaaagtagaaagatttatttgttttgccattcgaaatagtagcgttcgtgattctgatttgggtgtctttatagatatgatatatgggttattcatgtaatgtgtaggtttatgcattatgttggatgcatgtctggtgttattgctgtaaatggatgaatgttgttatttggagacattttttcattcattttttccctttttaattggaactggaagagggaaagttattgggagtaattaaaaggttgtgagttcgatacactgcatcaaagacgaagaacttgacatagatgttgaaggctaatccttatcactgcttgaattcaatatgtatctgaaaattttacccctctatatgcatctgtttttgctaataaagtgtttttggactatcatgttttgtgatgcttaagagggtgatattactgagataaatggaaatatcaaaataacatctattgtgaagtagttttagaggcttttgattggtgcttcgactttggatttacttgcatcctagattgactcagtttgtgcaatctgaaaatgatttcatcatggtatgaatatggttcaaaaacaaggctgcatctcatcgaacacgttgtaaagatttaaaattaatcaaattgatatttctagcattgtaaaggcttaaaaaactgtatctcaggctatattagggattctcatgctcttgaccgatatttaggtgttacgataaccacatcactcctacgatcgttaccagatgtttgcactttgttatgtgttacaagagataagtgttgcatgcagtggatcccttgtgattttgttctaggtagacagtgttgtttttgaatttcaaagcaggaattataacgagatttgatattagggtttgaatttttttaaaagttttttgcattcctccgatttgcaacacggtttacctactgtttatttgaattttttgtgtgagaaaaggcttacaggcttgctcttgtatatgtgtatgtatttgctttgtggttaaatatgctgcatgttgtaatgaaaactctgcccggggatggtgggcttacacgccaaagaaaaagattgttttccacaactaaaaatatcccattggcaacagcgtgcaattatttagggaatggtgttagagcattaaaattggaaaataaatgagctctcattttgttcaaaccatgagaattttcccctggtccaatattcagcgttttgtttcatttgtaaaaattacgatcatatttctctttagtgaagcaactgattggaaaactttggtatatgccatgtttctttccaagttaaagagttcccaggcatcatcctcaatgatcttcctctatattcctgtacaatattgttgataggaagttcattcatgccaataacaatatgtctcttgcgaatttctagaagaccagaaatttgttgtgacctgtggagttcttccaaaagtatcctctgtgcgacgcatgaaaaaagcctttgggctagactactgagatgcagctgcctggtaattcatgcctctctcccaagagagtacgagaagtcatttatagccgcttaagagagccaaggatcaatttaggcgtgttctatttccatatcttaatgtatcactgaagtttagcaagtaaacaaacatcacaatccctgatgcttgcatagtcatggcaaatgttatactctttgtttacatatgaaaaaccagatattactccatatttttagaaaccagcaaccaaaggagcttaaatggtccctgctcctaagtcatatctcttggcaatggggtgtttgtagatcttgagtgctgccagtccacttactgtaatgcaatacatcaatattgagctagtttctcatgggaaaaaaccatagaaatgggacaaatttgatgttaatgttctgtaatccaacttgaggattagttttatcacataaaagctacattgaaagttctattattattttgagtttgcatcttatgttgtttttcctttgtgattttatccattttcttaactagttattcgtttcctgaagtttttagtgtcataactcctaatcacaatcatgctacagggcacaacagtggtcgacaacttgctgtatagtgatgatattctttatatgttggacgctctcagaactcttggtttaaaagtggaggatgatagtacagccaaaagggcagtcgtagagggttgtggtggtctgtttcctgttggtaaagatggaaaggaagagattcaacttttccttggtaatgcaggaacagcgatgcgcccattgacagctgcggttgccgttgctggaggaaattcaaggtttgtccaattatattctttatgtgagtgttgttttttgtgttagtttcaatcatgaaggtactaatgcagaagccgtacccctgaaattttcttattttgtatatatcaattggtaattgatgtaagatatttttccgagaggaataaaaaacagggggatagagaatattaaagtattgttctatcacattaactttttatcaaaggtgtacattgtgtttgtgaagtttatagagctaaagggatggaagggaaggggattgaagaagaggagaaaagaagaagatcctcctttgaataccaaggtttgaacggaagggagaaggaggaaactctaaacaatatggagatgaactgatgaagtttttggatcagaaccgcttgagaatcagagttaagccatgtgaaagtctatgagcatgacttcacctggttaataattttaagctctcaacttctcatcctcttttctttgtcgaaaatgtcatgtcttcatgtgatacgtgcttacataatcgtttcttttgtaaagcgattgtctctccagatttctccccttacgaaaataatccttgaaggttgaagaaatcccttcatttccttttcccctatttctctacccttcctactttggtgaaggattttgtatccctcccttttcatggtctatagtgttagatattcaaacttaagcttctcaagtttcatgtgggttctgattattattttatatatgcattaccaaggattcaaggtaatttgaaccaatcaagaccagaaccggatatgaattcttcaacctagtctgaacttgtacatctaaaacatgctagttacaactgaaatatgatcaacttctatagcctataagactctcaccttcatttgtaggttgccacatagcacgtattgtcgatccatccatcctcattatttgactcatcaaataaaggaaccactcatgtgaaattcctgtcctacaaaataatccatcttcctcatctcatttgtattcatgtagtttgcttcctcaatcctacaagtaaaaggacaactgcgattcaactcttggacctatttgacagtaaatccacgaatattaggacaatcacgttggtaatgaaccatcgcttggcgcttgaaacatttgatttcctcaaaatcctttgcttcccccaacatttcatcctttgctttccacattaaagttggtgcccgaacctccatagccacaaacttggttgtagacaacacaccaacgtttctacctctaatagagataggatttgtataagccttactcttcttagatccttatgtttcatagacctttttcatcttgcacgtatcatcaaaagacaagttggtatgtatctcaggcttcacgcacaagtcaacatccttatcaccatacctcaatatgacaagccctacctctcaatcttctacaaagctatagatcttccatctcaatgcaaggaacttcaacacacgtataaactttttttgaatttaattgttcaaaggaaaaaacctttctttcatgtgcatttttatgtcaacatagctattaatcaacgtctttcctcttgtacgagctaattctcaatacctttaagcccacatgaagccttcttcttgagcttgaatttaaaaaactggaaaatttgcttttcgtacggagttcttgttgttgtaaaaacactccgaacttctctcctattcacgatgatcttttgggtgtaaggacatactatcaaaattttctacgttatcctgaagccatgatcatccacctcgcaatatgctcaactttcagttcacgctgattcaatatctgcgtgaatagattgatcaagcttgccatttgctcaagaatagttgagttttcctcttgtaatactcgattcctctcttctgtttttttagtcatcctactatttgctagcgacaatctcacaagaatataagaggggattctcatctattataacgcactactctgtacctaaggaactagtgtgggtgtcttatttttgtcctctcctcgtaggatataaaagagatgtgtatttgtgaatgattcaacataaaacaaaagtatgtaggctcttagattataccatctcattaacatatgatgaactcttacatatgctccttcacatatatttgtttttttggggtcatttattctagtagtccattgatattgaatcccttagttatggcattattgtccgtgcactgtctcaggagaatagatggattgttattgctttttctgtatctgatggtaatacaaagattgcaacatttgctagaccttgctgtttggatatagaaagaaaattatttgccattcatttccaaggggtcgaatgtagccttatccttattcgtgataacaaagagattgatttgtagtccttacatttgaaaatcctggacttcactgaatttatgtaactgttgcatgccatgaaatggaatactttattgattatgtgtttgggatatgtaagctgaagaaggcaatttcccagctcctattaatgctatctacacttcatattatcctttctgatatagtttacttttctttgcatgtgtcgaattagttatgtgcttgatggagtaccaagaatgagggagcgccccattggggatctggtagcaggtctaaagcaacttggttcagatgtagattgttttcttggcacaaattgccctcctgttcgggtcaatgctaaaggaggccttccagggggcaaggtaatgtgactaaacttctttatgttttgttagattttgggttttactccatctaattcaatgaatgatgattcatgcgtcaatttcttggtagcaattcctttccctacctaactatgacttctctgattgaccttttctatgaggtggggaatagtgtttttaatgtgaggaaaagagaaacccggggtatgagctttagcatgatagagtatgtatttgatactaaaactgcaaattaagttggaatcaagaataagaagacttatacagtataaatcaacagaggtgtctgctgtgtatatgtgtaatagacagttatagttagcaggaattcaggagataaaatgaagatggtgttgatgaaacttaacagacaattcagaaaacaaagtttgagtagtaagtagacttttgagaggctgcttctctctcaaatgagctataagttctaacaaaagtctcaatacataatttagataataatcagatgcctctctcacgctccatccctttattatctagatttcttgattttttttcataacttatgcaacttatttcagcctcttccttcattccaccttctacttgaaataaaatgcaatctctaccttgtttctttatggtttgttcattttaataaagatttagtatgaaagtcaatattgcttttgcattgttgtttgtctaagatcctaatggcaagtccacataagatgtttgttggtatatgctaggttattaggatcgggattctacttaggatcgttgaggaggtaggattgaaataggtagaatcggttcgtacttcgtaggattgtgccatgctacaaatatgcattgatgtgctttggattatttgttatcaattatatttgttcttctgttcagttttaaggtgtaagtaaaaacttattcgatttcatttattaagttttgaaaaaaatactttaataatcacttttaaactgcaaattgaaaaaaaattgcattttttagtgatgtttttttttttttgaatatcagtgatgttgatataattattttatagaatatttatacataattgaaatcttgattatatgaaaatattttacgattgaaactacttttataggatcggatcgtttgattgtaggatcttagaatcgtattatgatcctaccacctaaatttttgagctagttctaccacattatgactctacctaagatccggatcgattgtttatttttagatcgtagaatcgtagatcaaaatcgagactctaatatctatgggtatatgtgttaaattattagtcagtagaacaattctctttttcttggtaaataaaatcgtacgatactttagtccggggggcgcgctttgtgtcctgtacggtaagtatcctgtgacaaaactgtacttcaggtgtcttcttcactcttgggaaagtgtaaatgtcttttgtcccgattaaggaagattttatgagaaattttcccacatgcttggcaccaatttgtttttatttagtagaagaagaaattatgtataacatgcatactcaggatggtagtgaatatgaaatgaagaaaggaggtaaagttgcatgctggaaacttataaagagatgattcattcaaaattttgatattcctaatagcatagttgtggttttcaatttcacagtcatgaagtaagaacctctctaatattatccatttgttttgtgaattgatcaaattagaactacaatttcaatgtttgttgttaatgagaagttctagcatagttgtggttttcaatttcacagtcatgaagtaagaacctctctaatattatcgatttgttttgtaaactgtttgcaggtcaagctctctggatcggttagtagccaatatttaactgcacttctcatggctactcctttgggtcttggagacgtggagattgagatagttgataaattgatttctgtaccgtatgttgaaatgacaataaagttgatggaacgctttggagtatccgtagaacatagtgatagttgggacaggttctacattcgaggtggtcagaaatacaagtaagtctctcatcttatattacatgtccttttaacgtgtctccattagtagactgaaaacacatgtaaatacatcagatctcctggaaaggcatatgttgagggtgatgcttcaagtgctagctacttcctagccggagccgccgtcactggtgggactgtcactgtcaagggttgtggaacaagcagtttacaggtataatgttaacccttacccttcacattgttctgctaaattctagaggaccctttcaattctgggtgggataagcacggcaatttgaccgcaaaaaaattgcaaaattattctgctgatagaacatctcgagatgagatcatattgagttttggcgtcaacataaacctaatcaaataatgaaaaatacaaacatcatatggtttcttttgtctttatgactagacactctctattattccttgattgggatcttatttgaaattgctgtgtagcctacacctcatgttcagattttgttcgtataccagacttttcttgattgggatcttatttgtcccctggattttgcatagggtgatgtaaaatttgccgaagttcttgagaagatgggttgcaaggtcacctggacagagaatagtgtaactgttactggaccacccagggattcatctggaaagaaacatctgcgtgctatcgacgtcaacatgaacaaaatgccagatgttgctatgactcttgcagttgttgccttgtatgcagatgggcccaccgccatcagagatggtatgcttaactcttttcattgaactgtggcttatgtagactctttcaaatattgataatgaaatttagtgtgtcataagaaaatcggaatttggacttgtttttgttttggaatattcaaacagctagaaagatgttttttttgctctaatggtggttaaactatcactgtccttgatgggaaattatgatttttgctgtccccaatgtgtttattggcatatcttgatacaattaagtgagggaccactttgcaccattaagtttctcatagtcatcaccatttctaaataattaaaatttagtattttgtagacttgttatgaaatgacgttaatttttaacaatacttaatggtcttaaaggggtgtttgggaaatgactgctgattaaaattgttttgactagatgatttttatcaactgatttgacctattgaatttgaacatgcttttaggaatagcttgttcaaaaatagcttcttcagaacaataagttgtttcaatcaactaatataccaaacactaaccaattatttacaattgtgccaaaataagctaaaattgtcaaatcaactattatgcaacctcaggatgtgttccggggatatgaattgaaacccatctttggcagagtagagataagacgaaaattgatccaatcttagggatgaatgttgagatattatttccataaatatactgtggtggcatttagggttttttatttaacaaggggtgtttagtttggagaactttttattgaaaacctgttttctccatattcccatactgggttgacaatgaaaatttgaaaattagggttgaaaagaattattccttccattattagcttacaaacttatatagttggatgaaaattaaatttcattcactttcactccatctcccttggtagcattatcgtattccatcaaacaaaacaaaagaaaagtagtaataattaacgtttaattggaaaattgtttctcatggaaaatgttctccgccagaccaaatactttcggaacgaggaagcattttggaataaagaaccttgtgcttggattaatatatttgtctatgagatagttttctctagagtttacttgtatgtttattaactgaacacgcctcctttgcaatcaaagaaaaaggaattatttcacctctaagcataccgaaaacatcgacgcaaaatacatgtcaagatgtgtaatgattttgttatgtgaattaacagtggctagctggagagtgaaggaaaccgaacggatgattgccatttgcacagaactgagaaaggttagcagccttttacattctcgaaagctgtaattgttcttgagtaatatatattcaaactataactgatgttattttgcattcctatcaatacattcagcttggggcaacagttgaggaaggatctgattactgtgtgatcactccgcctgaaaagctaaaccccaccgccattgaaacttatgacgatcaccgaatggccatggcattctctcttgctgcctgtgcagatgttcccgtcactatccttgatccgggatgcacccgtaaaaccttcccggactactttgatgttttagaaaagttcgccaagcattgagtagctatatacgagatccttaaattgtacgccgaaggttttgatttgagtctaatagtagataaaaggctataaataaactggctttctgcttgagtaattatgaaattctttgtattatgtttgtgagattttaagtagcttataaattacaatgtactaaagtctagaaataagttatgtatcttttaaatcaatgagaaatgcatacttgaaaggcttgaccttgtattcgtgacctaaagagtactaactttggagtttccaagtcatttgtttatctcatttttttttaatttttgatttaaattgtttattttcatgagtaatcatgtactccctccgttcctttttgtttttccaccttactaatacaggtagttccataagtttttccactttagaatactttccatttttggaaagttttcatcccagttcccacatttactccttaaaaccccactttccttactttacactactatttaattattttctctcttatacttccaatacaagtattacattatactattatttaattattttttctctcatactttcaatacaatcattacttttcactactatgaagtaattaaaataatacccattaccaccaaagattccatttttcttaatcttggtgaaaaacccaaataggaacatcaaaaaggaacggagggagtatccaaaataagggaactaattgttatttttactatttttcattactttctaattgattctcccacctctttaacaataaaattcctttagttagcaaattcaaaaaaaaaaaattcctttagttagctatttaattaattttgttttcctaatttgactaatacttcttgaaaatttacctacaatccaagcgatctctttgaaattaaataggaatagtgtgttggggagctggcagttatagaatacgggtgatcaaaacaaattacaagatcgattcacatatggattttcggataatgaaaatcgtaatccggattatatatcgaatatccggtttatttattcttaattattttttgctttttctaaaacaaaattgtattttattacaccaagtagaagagtgaaacgttgaaactttgatgtgtttaaagaagagacacttgaaagatgacttgacttagagaagtgaaacataaaaaaatgaaatttgtaagagcatataacattagatacaaaagaatataaaaggagaatatatgtagatgataattgtaactgaatttgcaagttgtataatcaggcgtccaacatgcgtatttggagtaaagagataagtccaagcaacatagttgtctatgaccattttacattatggtatgatgattcatgactactgagcttgtttgttgattagtcttgtgcacttctaatatacaatcttaaatagcctctttttatcttctttttgtgactggtatgtaacatggctacatatattctgtgagtaatcttttaatattctttctagtttcctttgttcttatcttgtgttactctagtcgtattactggacgaacttaacttcataactttcagttcaatgtgctgaacctttatgttcttttgaaattggggcgtggtgtacccaacgtgcagaatctatttgtgagctttggtataaatgagcgattacaatgaaaggagcactctatgatttttgctatgccaagcaagcctggtgattttagtcagtttttgattttcctaatgtccttccagcaccatttaacggttagtttggtaatgaaatttggaaaatgtctgtattagcaaaagtcaaactacttttaatgactttcacgagtctcttcatcaagatgtttgatgtgtgcatgtatgtgtgcgcggaaatagtatctactcctcttgatttactcagttctcgaacaaaatttgactgcaacagacaatatgtaaccttaaaatgctttgacacgcgatcaattttcaatctagatttggatttatgatcaaagtaaagaaggtttgatgtaaaaagcctaataaaagaagatattgttctaatgatatcaattgaagtccaattctgccagatatatctatagcttaaaactagggcattatatacatgcaccgaaatgtaagtagcaaatcaacaacgataaaattaagagcttaactagttgagcaagagctacccctcggaatcaatcagtctcagttttagcgactttttatccttgaatgtcattttgtaagttatctactttgaaatatcgagaattttttcatagttatataggaaggtcattaatgaagaaattattttgaataagttagaacttcaaaataaacatttaactacaaatcattgacaaacctagtacattgcatagggatccattatcacaacttccaaagaagattgtaacttaaaccctaatttgtttccaagcttgcaatttcaacaaaatctaacaaattccaactttttaagctttaaaaccacgtacattggacatttaattatatcattcctcaggattctaacttatatataacattaattatattacctaatatactataaaatttagaatttaaaatctgaaatttatcaccaaattacgtgtcaaagtatattattttatatttatcttttcatcgtgtttcctgattaactctttcggatatattattactcttgttaacaataccctcaaatgttcatttgctttttcccttataaaaaatcggaaaactttacatagcatgaataaggtttgatgaaacaccattgtagcactttttttgtttttgtatgatagcaacaagattacaagtttataaaaacacttagcaaattatgttaaatacaagcctattatgttaattttggactttttttaaatgtttttttagatttatatttacgatatacttgtatataaataaaacaaaatttaaaaatcaaaattttcctcccaacttcctccctttccttgttagttgtcacaacccctaacccaaccatcctttcccttgtgtcaacaaagagtacttaaaattagatatcgtattattgtaaaattcaaattatcataagagcatgatgtacatgtaacaagaaggtcaaacaaaagggagttaaaatcaatttagctttttactaaattcttaaaatctcgcaacgagaaaattaaatataagttagatttttgcattatttactaaaagttataaatctataggatgagctatatgaattaaatgtttaggaaatttaaaattatacccagttctcatatgaacatcaaatattacacggtatctataaacaaaaaccgtaattaaaagcagtctacgttaatttgaaaatctccttatattaatcaaggaatcagattaaaactctattaggttgtgtcttaaactattttttattttacatttatacattaaaaaatttattcgagggtatattaaaaataaataatattcttcataatcttagctaatcctaattcctaactatcaaatcaatggttaacacagtaaattaccctctaatcccccaacagcccattgtttgtttggaagtgtaagcataaaaaacctcaataatactaattagtgtgctgtaaccatggtgtctatgacgtgtgttgggagttgagagcaaatagaattctgtgccaattgaaggctaaaacttaaaaccaaccaaacactcttttagagacgtattttaagtccagcctatcaaagacaatacctacctactgtattcttaatgtcaacttacattatccttaatgcctactttcaatatgttaaatgtctacttacatcatttttaatgcatacttacagtattttaaacaatttataacgggtcagcccaatcagagatggtctctcaaacagaccgtctaagaccgtctctcacaagaatttgtgcaagcccttaatcctctaaacaaagatctcattccctggtttttgttcccttacaactcaacctttgctttgttttgtataaacaaccttcccttttttatgctttcctttgccagatttctaatcttccatcccccaactagcctacattgtttcattgaataattctaattaacacttctcaatacttgtacttaccgaattcttagtcatttgtatttaaagattatgcccacgttcactccccctccttgataatcacgtttttgctaatcccaatcttcttgatattactcatcttcacctttatgaacttgtaagctttgtatatatacacccaccatatgtatatcctttcatattaagtacttcatcatatccttaatactactttcaaaaaaaggaaaaacacaataaaaaggttagttatggctcaaattcaacaattcactagcatttcttatgctccttctaagagaaaggggaatgggttcactaggaagtgtgcctctttaattaaagagcaacacgctcgaatctatatccttagaagatgtgctacaatgcttctttgctcgtacattgaagccgatgatgactaaacatctcctttatcttagccttacgttctgatgtaatccggtgcatactagtactagctacagtatatacgtaagtcataactatgccttttcccactctccattgtataccaggctcgagcagtaatgcaccttcgtttaatcgcttaatcatccaaatttttgacccaaaaggcaataattcgattgggttttttcactttttagtttggatggttgctggtttaagaattttatgggtgcattgctgcttttttgtaaaccagcagtagtgctgatgaggcttacaagcatcaattcaatgccgctcagagaactggacttgagatttagagatggctgaaaatggggttatatacttaaacttatgttgaatgtaactctaagagttttatcctaaaagatatatatctgataatacgactttgagagagtattatcattgtgttgtgttactaatctttatgagaaaaatgaaatgaaattgagtggatatgtaatacttcaacattccaaagcatattcttttgttgatatgaacaatcctttaagctttcaactaaatggaaacatatacatagatttgcatacaaaaatcagtatacatgatcaagaaacctttgagcaatttaaatgttgtcagcccagaattgagttctgaatacataaacgcagtctaaattcaactcaaatgcatttagaatctgaaaattttttggttgcatcaaaatttatattaaaaaaatcacaattacaacactttggagctccaaaacctgatattacaccgattctaaatttgctcttcaaattaaaatccctagcaacattgactattaattactgatcaattaaaatccctaacaatttcatcatcaattcttagaaaattaaaatccagcaacaatcacaaactaaatcaaattcaacgctaaaacacaaatcaaaactcattatacgcaccagcttcagcatcaagaagaccgccataaggatcttgatctccaaaactgggaaccctaagtacaccgtgtaatccaacaattacagcagaaatcacacaggcaaccatcagattcatccaagaatgagcgataaacaaagcgataatcgtaattacagcaagaacgccaaaaacgatgcgatcgtcaacgatgaaccccgtaatttcaagaggaaaaatgcgaggattaaaataaagaaagtaccaagataatgacaccacaaacacgagaaggagtgagagaggacgtaaagcgagagtaaagaagaagatgatgagaaagacgttaatgtagttaactcggaagtgagttagatttgagttgaaccgagttgtggcgtcagaaagggatactgggaatgaaagggcggagatatcgaaaaattccgaccatggtctggttgttgttgcggcggggtagtcatcggaagatggttgtaaagacatgtttgatttgagattttgtttttctttgacgaagatttgggttgtcgtgtggtggatggcgaatttctaattactctccatatattgttcaattttcatatactttatcatttctttattcttactaattcactaactttatacctcaaaaaaaataaattaatttactaactttatcgacatcgtcttatcgggagactacttcaattagattatctcatttccctattattttaaaaaattatattatatacgagtatgtccaattttcgttgtgttttttaaattttctttcattaaagggctgcttgtatgggtccgtctcacaatgagaggtcttatacaagacttgttgttcttaattatatagagtcagaggccggaggaaagagggtagcgacaaattataatcgtacgacgtacctatccaaaaagaggacaaggagaaatgtgtgtactcaatttatcacataaaaaatagatttatacataaagaaagtcagttcttatttatatgagtttgaaaaattatcaatttgtaatataaacatgttagatctgttagcaatatatgagttttatttttttaatttttacaagtatttcgaaaataattataacgatcgtgttcaacccatgtaataaagatctagttgaataataaatcatttttataaaagaaaatgttacttgctagatttgcaactaaatgaaaacaaaatgaatataaagtagtaatatgttataatacatttaaaattaaaataataactattttattatcatacattcacaagatgaaatatgcattacatcatgtacatatattatatacttatatatacttatacccctacataattttctctactatttattattccttatacatactatataaccaaaaatatttatgctataattatcaaataaaagatgcatacatatacctaactatatatttcttcactaggaattcattacaaaaaaaaaaaaagaaaattgtcaaaaataaatcaacttttgctcaatcctttaaaaataaacccaactattaattattttcaaataaatccatctacttgatataactgctgaaaataaatccaactaatgaatattcctaattgcttgatcacaaagaagctttgaagatgcttataaacaa

SEQ ID NO: 9 - DNA, 668 bp, Amaranthus palmeri
gaacatatgagtgatcaattgtggagttaaactgatcaatatctatctaagtatttgatgttttatgatctaactcaattttgaacgtataagcttcaattatcgttttcaaaataagtatttcaaagtctataaagatattgtataagttttagttcattttgaataagttaatagttaaattatgacatataatttgaccatgatattttataatctaacttaattttgaacttttaatattcaattatcgttttaaaaataagtattcaaattgtatagatatattgtataacattttgttcaaatttaattattgatagttttatttattgaccattcattttgaaattcatccatagaatgatagaataacactattttttatataacttcgttctaaaattttaaagcataaccagaagtattaggtagcaatttatcactttaacatcaaaattgatcacttataggttcaaattgaaacttttactttaattgatatgcttaagtactactttaaattgaaaattaatatctttaaggttaaaattgatacctttaagattaggaaaaattgtcgggaataatccgaactatttgcaaactgctgtgaataatcccacgtattgattatttatgaataatcccacctttcaagtgtattt

SEQ ID NO: 10 - DNA, 13434 bp, Amaranthus palmeri
tatctttaaggttaaaattgatacctttaagattaggaaaaattgtcgggaataatccgaactatttgcaaactgctgtgaataatcccacgtattgattatttatgaataatcccacctttcaagtgtatttgctcgtggcacccccaaatgaaatttgacctattttagtaggttatcttcttcaatgtcttcttcaatgcctctttataaacccagctactgatttgtatcccacaagccattgttcttcttcaatttattccactttgttcttcaatcttcacctttcttcttccattgtgttcttccttcttcactattaaccctacgcaagccctcttcaaatgtattacaattttgaatcaaataatacaattgatgctcataattaacaccaagactagtgaccaccaaatcattaagatcaaaccatgaaatgcaatcaggatcaagtgaaaggcttctatattccccacccacataattcaaccctaccccagtccttttgaatttacccccataccaaaacatcacttgaaatttttcaaaattattaacctaaaaaaacaacacaattgaacataattaccaatgcatttctataacaacaaagaaaacattaaagaatcaaagattaaagtgaggaatggcaaagaaattaccatggtttgattgagaacaagaagacccaaaattcgtctgcacagccccaaaattttcgcacagagcagcaataccacccccaaaattcgacactgttgataaaaaataaaccctaatttttttgggaaattacagttgatgaatgtgagtgttgattatggcgtgaagcttgatgattatgaatgacaattgtgcttcaagtttttgaaattttgaagttttgaaggaagatggtgtgaaggaatggtagaacaggaaatgaagttaagggtatgcctttttgggttgaatgtttattttatggaattaaagaatatgaaagatcatactctaacctgcaatattaggtcaaatttcatttgggggtgccacgagcaaatacacttgaaaggtgagattattcataaataatcaatacttgggattattcacataggtttgcgaatagttcggattattcccaacaatttttccttaagattataattaaaaaatccccaaaagatgaaaaaaagagaaagcatgtaaaacacgcgaatcagaccggtccactcttgttttaatttgagacaattttgatgttgagtcatcccacaccaaccccaaaaaattcaacaacaaactcttataatgattccctctactctactagagtctacaccaacccactttctctttgcccaccaaaactttggtttggtaagaactaagccctcttctttcccttctctctcttaaaagcctaaaatccacctaactttttcagccaacaaacaacgccaaattcagaggaagaataatggctcaagctactaccatcaacaatggtgtccatactggtcaattgcaccatactttacccaaaacccagttacccaaatcttcaaaaactcttaattttggatcaaacttgagaatttctccaaagttcatgtctttaaccaataaaagagttggtgggcaatcatcaattgttcccaagattcaagcttctgttgctgctgcagctgagaaaccttcatctgtcccagaaattgtgttacaacccatcaaagagatctctggtactgttcaattgcctgggtcaaagtctttatccaatcgaatccttcttttagctgctttgtctgaggtatttatttctcaactgcgaaaacaatctctatttgatattggaatttatattacatactccatcttgttgtaattgcattagtacatacttatgttttgacctttgttcgtttgtttgttgaattggtagtgttgagaatttgaatctaattatttgtttttccatgtgaatttaatctgattaaatccacttcttatttatgttaagttgcaatgatgtttgccaaacggttatcattgaaggataagttcgcctacttttgaccctcccaacttcgcgttggtagagccattttatgttattgggggaaagtagaaagatttatttgttttgccattcgaaatagtagcgttcgtgattctgatttgggtgtctttatagatatgatatatgggttattcatgtaatgtgtaggtttatgcattatgttggatgcatgtctggtgttattgctgtaaatggatgaatgttgttatttggagacattttttcattcattttttccctttttaattggaactggaagagggaaagttattgggagtaattaaaaggttgtgagttcgatacactgcatcaaagacgaagaacttgacatagatgttgaaggctaatccttatcactgcttgaattcaatatgtatctgaaaattttacccctctatatgcatctgtttttgctaataaagtgtttttggactatcatgttttgtgatgcttaagagggtgatattactgagataaatggaaatatcaaaataacatctattgtgaagtagttttagaggcttttgattggtgcttcgactttggatttacttgcatcctagattgactcagtttgtgcaatctgaaaatgatttcatcatggtatgaatatggttcaaaaacaaggctgcatctcatcgaacacgttgtaaagatttaaaattaatcaaattgatatttctagcattgtaaaggcttaaaaaactgtatctcaggctatattagggattctcatgctcttgaccgatatttaggtgttacgataaccacatcactcctacgatcgttaccacatgttaccacatgtttgcactttgttatgtgttacaagagataagtgttgcatgcagtggatcccttgtgattttgttctaggtagacagtgttgtttttgaatttcaaagcaggaattataacgagatttgatattagggtttgaatttttttaaaagttttttgcattcctccgatttgcaacacggtttacctactgtttatttgaattttttgtgtgagaaaaggcttacaggcttgctcttgtatatgtgtatgtatttgctttgtggttaaatatgctgcatgttgtaatgaaaactctgcccggggatggtgggcttacacgccaaagaaaaagattgttttccacaactaaaaatatcccattggcaacagcgtgcaattatttagggaatggtgttagagcattaaaattggaaaataaatgagctctcattttgttcaaaccatgagaattttcccctggtccaatattcagcgttttgtttcatttgtaaaaattacgatcatatttctctttagtgaagcaactgattggaaaactttggtatatgccatgtttctttccaagttaaagagttcccaggcatcatcctcaatgatcttcctctatattcctgtacaatattgttgataggaagttcattcatgccaagggataacaatatgtctcttgcgaatttctagaagaccagaaatttgttgtgacctgtggagttcttccaaaagtatcctctgtgcgacgcatgaaaaaagcctttgggctagactactgagatgcagctgcctggtaattcatgcctctctcccaagagagtacgagaagtcatttatagccgcttaagagagccaaggatcaatttaggcgtgttctatttccatatcttaatgtatcactgaagtttagcaagtaaacaaacatcacaatccctgatgcttgcatagtcatggcaaatgttatactctttgtttacatatgaaaaaccagatattactccatatttttagaaaccagcaaccaaaggagcttaaatggtccctgctcctaagtcatatctcttggcaatggggtgtttgtagatcttgagtgctgccagtccacttactgtaatgcaatacatcaatattgagctagtttctcatgggaaaaaaccatagaaatgggacaaatttgatgttaatgttctgtaatccaacttgaggattagttttatcacataaaagctacattgaaagttctattattattttgagtttgcatcttatgttgtttttcctttgtgattttatccattttcttaactagttattcgtttcctgaagtttttagtgtcataactcctaatcacaatcatgctacagggcacaacagtggtcgacaacttgctgtatagtgatgatattctttatatgttggacgctctcagaactcttggtttaaaagtggaggatgatagtacagccaaaagggcagtcgtagagggttgtggtggtctgtttcctgttggtaaagatggaaaggaagagattcaacttttccttggtaatgcaggaacagcgatgcgcccattgacagctgcggttgccgttgctggaggaaattcaaggtttgtccaattatattctttatgtgagtgttgttttttgtgttagtttcaatcatgaaggtactaatgcagaagccgtacccctgaaattttcttattttgtatatatcaattggtaattgatgtaagatatttttccgagaggaataaaaaacagggggatagagaatattaaagtattgttctatcacattaactttttatcaaaggtgtacattgtgtttgtgaagtttatagagctaaagggatggaagggaaggggattgaagaagaggagaaaagaagaagatcctcctttgaataccaaggtttgaacggaagggagaaggaggaaactctaaacaatatggagatgaactgatgaagtttttggatcagaaccgcttgagaatcagagttaagccatgtgaaagtctatgagcatgacttcacctggttaataattttaagctctcaacttctcatcctcttttctttgtcgaaaatgtcatgtcttcatgtgatacgtgcttacataatcgtttcttttgtaaagcgattgtctctccagatttctccccttacgaaaataatccttgaaggttgaagaaatcccttcatttccttttcccctatttctctacccttcctactttggtgaaggattttgtatccctcccttttcatggtctatagtgttagatattcaaacttaagcttctcaagtttcatgtgggttctgattattattttatatatgcattaccaaggattcaaggtaatttgaaccaatcaagaccagaaccggatatgaattcttcaacctagtctgaacttgtacatctaaaacatgctagttacaactgaaatatgatcaacttctatagcctataagactctcaccttcatttgtaggttgccacatagcacgtattgtcgatccatccatcctcattatttgactcatcaaataaaggaaccactcatgtgaaattcctgtcctacaaaataatccatcttcctcatctcatttgtattcatgtagtttgcttcctcaatcctacaagtaaaaggacaactgcgattcaactcttggacctatttgacagtaaatccacgaatattaggacaatcacgttggtaatgaaccatcgcttggcgcttgaaacatttgatttcctcaaaatcctttgcttcccccaacatttcatcctttgctttccacattaaagttggtgcccgaacctccatagccacaaacttggttgtagacaacacaccaacgtttctacctctaatagagataggatttgtataagccttactcttcttagatccttatgtttcatagacctttttcatcttgcacgtatcatcaaaagacaagttggtatgtatctcaggcttcacgcacaagtcaacatccttatcaccatacctcaatatgacaagccctacctctcaatcttctacaaagctatagatcttccatctcaatgcaaggaacttcaacacacgtataaactttttttgaatttaattgttcaaaggaaaaaacctttctttcatgtgcatttttatgtcaacatagctattaatcaacgtctttcctcttgtacgagctaattctcaatacctttaagcccacatgaagccttcttcttgagcttgaatttaaaaaactggaaaatttgcttttcgtacggagttcttgttgttgtaaaaacactccgaacttctctcctattcacgatgatcttttgggtgtaaggacatactatcaaaattttctacgttatcctgaagccatgatcatccacctcgcaatatgctcaactttcagttcacgctgattcaatatctgcgtgaatagattgatcaagcttgccatttgctcaagaatagttgagttttcctcttgtaatactcgattcctctcttctgtttttttagtcatcctactatttgctagcgacaatctcacaagaatataagaggggattctcatctattataacgcactactctgtacctaaggaactagtgtgggtgtcttatttttgtcctctcctcgtaggatataaaagagatgtgtatttgtgaatgattcaacataaaacaaaagtatgtaggctcttagattataccatctcattaacatatgatgaactcttacatatgctccttcacatatatttgtttttttggggtcatttattctagtagtccattgatattgaatcccttagttatggcattattgtccgtgcactgtctcaggagaatagatggattgttattgctttttctgtatctgatggtaatacaaagattgcaacatttgctagaccttgctgtttggatatagaaagaaaattatttgccattcatttccaaggggtcgaatgtagccttatccttattcgtgataacaaagagattgatttgtagtccttacatttgaaaatcctggacttcactgaatttatgtaactgttgcatgccatgaaatggaatactttattgattatgtgtttgggatatgtaagctgaagaaggcaatttcccagctcctattaatgctatctacacttcatattatcctttctgatatagtttacttttctttgcatgtgtcgaattagttatgtgcttgatggagtaccaagaatgagggagcgccccattggggatctggtagcaggtctaaagcaacttggttcagatgtagattgttttcttggcacaaattgccctcctgttcgggtcaatgctaaaggaggccttccagggggcaaggtaatgtgactaaacttctttatgttttgttagattttgggttttactccatctaattcaatgaatgatgattcatgcgtcaatttcttggtagcaattcctttccctacctaactatgacttctctgattgaccttttctatgaggtggggaatagtgtttttaatgtgaggaaaagagaaacccggggtatgagctttagcatgatagagtatgtatttgatactaaaactgcaaattaagttggaatcaagaataagaagacttatacagtataaatcaacagaggtgtctgctgtgtatatgtgtaatagacagttatagttagcaggaattcaggagataaaatgaagatggtgttgatgaaacttaacagacaattcagaaaacaaagtttgagtagtaagtagacttttgagaggctgcttctctctcaaatgagctataagttctaacaaaagtctcaatacataatttagataataatcagatgcctctctcacgctccatccctttattatctagatttcttgattttttttcataacttatgcaacttatttcagcctcttccttcattccaccttctacttgaaataaaatgcaatctctaccttgtttctttatggtttgttcattttaataaagatttagtatgaaagtcaatattgcttttgcattgttgtttgtctaagatcctaatggcaagtccacataagatgtttgttggtatatgctaggttattaggatcgggattctacttaggatcgttgaggaggtaggattgaaataggtagaatcggttcgtacttcgtaggattgtgccatgctacaaatatgcattgatgtgctttggattatttgttatcaattatatttgttcttctgttcagttttaaggtgtaagtaaaaacttattcgatttcatttattaagttttgaaaaaaatactttaataatcacttttaaactgcaaattgaaaaaaaattgcattttttagtgatgtttttttttttttgaatatcagtgatgttgatataattattttatagaatatttatacataattgaaatcttgattatatgaaaatactttacgattgaaactacttttataggatcggatcgtttgattgtaggatcttagaatcgtattatgatcctaccacctaaatttttgagctagttctaccacattatgactctacctaagatccggatcgattgtttatttttagatcgtagaatcgtagatcaaaatcgagactctaatatctatgggtatatgtgttaaattattagtcagtagaacaattctctttttcttggtaaataaaatcgtacgatactttagtccggggggcgcgctttgtgtcctgtacggtaagtatcctgtgacaaaactgtacttcaggtgtcttcttcactcttgggaaagtgtaaatgtcttttgtcccgattaaggaagattttatgagaaattttcccacatgcttggcaccaatttgtttttatttagtagaagaagaaattatgtataacatgcatactcaggatggtagtgaatatgaaatgaagaaaggaggtaaagttgcatgctggaaacttataaagagatgattcattcaaaattttgatattcctaatagcatagttgtggttttcaatttcacagtcatgaagtaagaacctctctaatattatccatttgttttgtgaattgatcaaattagaactacaatttcaatgtttgttgttaatgagaagttctagcatagttgtggttttcaatttcacagtcatgaagtaagaacctctctaatattatcgatttgttttgtaaactgtttgcaggtcaagctctctggatcggttagtagccaatatttaactgcacttctcatggctactcctttgggtcttggagacgtggagattgagatagttgataaattgatttctgtaccgtatgttgaaatgacaataaagttgatggaacgctttggagtatccgtagaacatagtgatagttgggacaggttctacattcgaggtggtcagaaatacaagtaagtctctcatcttatattacatgtccttttaacgtgtctccattagtagactgaaaacacatgtaaatacatcagatctcctggaaaggcatatgttgagggtgatgcttcaagtgctagctacttcctagccggagccgccgtcactggtgggactgtcactgtcaagggttgtggaacaagcagtttacaggtataatgttaacccttacccttcacattgttctgctaaattctagaggaccctttcaattctgggtgggataagcacggcaatttgaccgcaaaaaaattgcaaaattattctgctgatagaacatctcgagatgagatcatattgagttttggcgtcaacataaacctaatcaaataatgaaaaatacaaacatcatatggtttcttttgtctttatgactagacactctctattattccttgattgggatcttatttgaaattgctgtgtagcctacacctcatgttcagattttgttcgtataccagacttttcttgattgggatcttatttgtcccctggattttgcatagggtgatgtaaaatttgccgaagttcttgagaagatgggttgcaaggtcacctggacagagaatagtgtaactgttactggaccacccagggattcatctggaaagaaacatctgcgtgctatcgacgtcaacatgaacaaaatgccagatgttgctatgactcttgcagttgttgccttgtatgcagatgggcccaccgccatcagagatggtatgcttaactcttttcattgaactgtggcttatgtagactctttcaaatattgataatgaaatttagtgtgtcataagaaaatcggaatttggacttgtttttgttttggaatattcaaacagctagaaagatgttttttttgctctaatggtggttaaactatcactgtccttgatgggaaattatgatttttgctgtccccaatgtgtttattggcatatcttgatacaattaagtgagggaccactttgcaccattaagtttctcatagtcatcaccatttctaaataattaaaatttagtattttgtagacttgttatgaaatgacgttaatttttaacaatacttaatggtcttaaaggggtgtttgggaaatgactgctgattaaaattgttttgactagatgatttttatcaactgatttgacctattgaatttgaacatgcttttaggaatagcttgttcaaaaatagcttcttcagaacaataagttgtttcaatcaactaatataccaaacactaaccaattatttacaattgtgccaaaataagctaaaattgtcaaatcaactattatgcaacctcaggatgtgttccggggatatgaattgaaacccatctttggcagagtagagataagacgaaaattgatccaatcttagggatgaatgttgagatattatttccataaatatactgtggtggcatttagggttttttatttaacaaggggtgtttagtttggagaactttttattgaaaacctgttttctccatattcccatactgggttgacaatgaaaatttgaaaattagggttgaaaagaattattccttccattattagcttacaaacttatatagttggatgaaaattaaatttcattcactttcactccatctcccttggtagcattatcgtattccatcaaacaaaacaaaagaaaagtagtaataattaacgtttaattggaaaattgtttctcatggaaaatgttctccgccagaccaaatactttcggaacgaggaagcattttggaataaagaaccttgtgcttggattaatatatttgtctatgagatagttttctctagagtttacttgtatgtttattaactgaacacgcctcctttgcaatcaaagaaaaaggaattatttcacctctaagcataccgaaaacatcgacgcaaaatacatgtcaagatgtgtaatgattttgttatgtgaattaacagtggctagctggagagtgaaggaaaccgaacggatgattgccatttgcacagaactgagaaaggttagcagccttttacattctcgaaagctgtaattgttcttgagtaatatatattcaaactataactgatgttattttgcattcctatcaatacattcagcttggggcaacagttgaggaaggatctgattactgtgtgatcactccgcctgaaaagctaaaccccaccgccattgaaacttatgacgatcaccgaatggccatggcattctctcttgctgcctgtgcagatgttcccgtcactatccttgatccgggatgcacccgtaaaaccttcccggactactttgatgttttagaaaagttcgccaagcattgagtagctatatacgagatccttaaattgtacgccgaaggttttgatttgagtctaatagtagataaaaggctataaataaactggctttctgcttgagtaattatgaaattctttgtattatgtttgtgagattttaagtagcttataaattacaatgtactaaagtctagaaataagttatgtatcttttaaatcaatgagaaatgcatacttgaaaggcttgaccttgtattcgtgacctaaagagtactaactttggagtttccaagtcatttgtttatctcatttttttttaatttttgatttaaattgtttattttcatgagtaatcatgtatctttcttattctaaccaaatgtaatactccttccaactctctttaaacgtccacactctgggcacagagtgtaatagtgtggtggttggagtcttttaagtgattataataattgtaaatgtggtagttagagtattttaagtaatgtaggtggggtattatggtcttgttgaacataggatatttaggtaaaaaatctatgcaaaaaaaggaaagtaagcaaataaagcgaattgacctgaaaagaaaagtggacatgtatagtgagttggaggaagtatttttaatttcggcaaattaatcttaaatgtcgtattttcttttatgataagtttttcgaatacttttactttcatgggacaactttaccattaatatcatcctcacttaccccatttaacaatcaactgacataataattaaaacataaatctaatcttaaagttttggtctaatgtctcaataatgattaattttatcggacagatgccctcaataagtacttaaaattaatccattgtttttgcatgctttacttaaatgtttaatgataaataacttttggtctaaattctttaggaaataaacgctaaaaaagatttagaaacagtccctattaaactaatttgttacttatatttacaaaagtttctatttgttccatgaaatgtatactacaaaaacttgatatttttgcttgtcatgttcattttcatttggtttgcaaaatgttgtttatattgattttgtgatgtttatctgatcttcaatgcaccaaggaaaaatataacttttcattttgttgtgctaccaaagtccattagtatttaaagtatggcaagaaaaaaagataaacagttgctgaagacgtcaattaaatttcgattaaagatcaaactaaaattgataaaaagatgtaagatgtttgttattatgtaatacaatttgacgtagtttttgacgtttttatttaaatataaaaattggcctatttttaatttaactgttgtttgcgttttcgaaaatcctaattttcacgcatttaaagactttttatgtaatgaaaaataattagagttttaaaaaagtaaacctcctttaatatagacccaaaagagacccaaagagaacgcaacacattgcctaagagaaaaaagtatgagttgatcaataataaaaaaaatttcgatcaatatctctcttaaaactatgaggcatgagcaatgacaacctattttagtttcctaaataaaatttggaggattggtagttcccatggcaatgcaattgagttaaaattagggttttaaaaaaagtaaacatccttaaatcatagatccaaagagaacaacgcacactacaacataatttgtttttagtaggatatat

SEQ ID NO: 11 - DNA, 38 bp, Amaranthus palmeri
atatttaatttaaatgtcactattacaaatttcttata

SEQ ID NO: 12 - DNA, 1911 bp, Amaranthus palmeri
aaactttggtttggtaagaactaagccctcttctttcccttctctctcttaaaagcctaaaatccacctaactttttcagccaacaaacaacgccaaattcagagaaagaataatggctcaagctactaccatcaacaatggtgtccatactggtcaattgcaccatactttacccaaaacccacttacccaaatcttcaaaaactcttaattttggatcaaacttgagaatttctccaaagttcatgtctttaaccaataaaagagttggtgggcaatcatcaattgttcccaagattcaagcttctgttgctgctgcagctgagaaaccttcatctgtcccagaaattgtgttacaacccatcaaagagatctctggtactgttcaattgcctgggtcaaagtctttatccaatcgaatccttcttttagctgctttgtctgagggcacaacagtggtcgacaacttgctgtatagtgatgatattctttatatgttggacgctctcagaactcttggtttaaaagtggaggatgatagtacagccaaaagggcagtcgtagagggttgtggtggtctgtttcctgttggtaaagatggaaaggaagagattcaacttttccttggtaatgcaggaacagcgatgcgcccattgacagctgcggttgccgttgctggaggaaattcaagttatgtgcttgatggagtaccaagaatgagggagcgccccattggggatctggtagcaggtctaaagcaacttggttcagatgtagattgttttcttggcacaaattgccctcctgttcgggtcaatgctaaaggaggccttccagggggcaaggtcaagctctctggatcggttagtagccaatatttaactgcacttctcatggctactcctttgggtcttggagacgtggagattgagatagttgataaattgatttctgtaccgtatgttgaaatgacaataaggttgatggaacgctttggagtatccgtagaacatagtgatagttgggacaggttctacattcgaggtggtcagaaatacaaatctcctggaaaggcatatgtagagggggacgcttctagtgctagctacttcctagcaggagccgccgtcactggtgggactgtgactgtcaagggttgtggaacaagcagtttacagggtgatgtaaaatttgccgaagttcttgagaagatgggttgcaaggtcacctggacagagaatagtgtaactgttactggaccacccagggattcatctggaaggaaacatctgcgtgctatcgacgtcaacatgaacaaaatgccagatgttgctatgactcttgcagttgttgccttgtatgcagatgggcccaccgccatcagagatgtggctagctggagagtgaaggaaaccgaacggatgattgccatttgcacagaactgagaaagcttggggcaacagttgaggaaggatctgattactgtgtgatcactccgcctgaaaagctaaaccccaccgccattgaaacttatgacgatcaccgaatggccatggcattctctcttgctgcctgtgcagatgttcccgtcactatccttgatccgggatgcacccgtaaaaccttcccggactactttgatgttttagaaaagttcgccaagcattgagtagctatatacgagatccttaaattgtacgccgaaggttttgatttgagtctaatagtagataaaaggctataaataaactggctttctgcttgagtaattatgaaattctttgtattatgtttgtgagattttaagtagcttataaattacaatgtactaaagtctagaaataagttatgtatcttttaaatcaatgagaaatgcatacttgaaaggcttgaccttgtatttgtgacct

SEQ ID NO: 13 - DNA, 1554 bp, Amaranthus rudis
atggctcaagctactgccatcaacaatggtgtccaaactggtcaattgcaccatactttacccaaaacccacttacccaaatcttcaaaaattgttaattttggatcaaacttgagaatttctccaaagttcatgtctttaaccattaaaagagttggtgggcaatcatcaattattcccaagattcaagcttcagttgctgctgcagctgagaagccttcatctgtcccagaaattgtgttacaacccatcaaagagatctctggtaccattcaattgcctgggtcaaagtctctatctaatcgaatccttcttttagctgctttgtctgagggcacaacagtggtcgacaacttgctgtatagtgatgatattctttatatgttggacgctctcagaactcttggtttaaaagtggatgatgataatacagacaaaagggcagtcgtggagggttgtggtggtctgtttcctgttggtaaagatggaaaggaagagattcaacttttccttggaaatgcaggaacagcgatgcgcccattgacagctgcggttgccgttgctggaggaaattcaagctatgttcttgacggagtaccaagaatgagggagcgccccattggggatctggtagcaggtctaaagcaacttggttcagatgttgactgttttcttggcacaaattgccctcctgttcgggtcaatgctaaaggaggccttccagggggcaaggtcaagctctctggatcggttagtagccaatatttaactgcacttctgatggctactcctttgggtcttggagatgtggagattgagatagttgataaattgatttccgtaccgtatgttgaaatgacaataaggttgatggaacgctttggagtatctgttgaacatagtgatagttgggacaggttcttcatccgaggtggtcagaaatacaaatctcctggaaaggcatatgttgagggtgacgcttcaagtgctagctacttcctagctggagctgccgtcactggggggactgtgactgtcaagggttgtggaacaagcagtttacagggtgatgtaaaatttgccgaagttcttgagaagatgggttgcaaggtcacctggacagacaatagcgtaactgttactggaccacccagggaatcatctggaaggaaacatttgcgcgctatcgacgtcaacatgaataaaatgccagatgttgctatgactcttgcagttgttgccttgtatgcagatgggcccaccgccatcagagatgtggctagctggagagtgaaggaaaccgaacggatgattgccatttgcacagaactgagaaagcttggggcaacagttgaggaaggatctgattactgtgtgatcactccgcctgaaaagctgatacccaccgccatcgaaacttatgacgatcaccgaatggccatggcattctctcttgctgcctgtgctgatgttcccgtcactatccttgatccgggatgtacacgtaaaaccttcccggactactttgatgtcttagaaaagttcgccaagcat

SEQ ID NO: 14 - DNA, 2425 bp, Amaranthus rudis
tgatacaaagattgcaacatttgcaagaccttgctgttcggatttagagcgaaatctatttgccattaatttcgaatgggtcgaatttagccttatccttattcgtgataacaaagagattgctttgaagtccttacgtttgaaaatcctggacttcactgaattaatgtaattttccaggatttctgttacgtgccatgaaatggaatactttattgattatgtgctagggataaataagcttaagaaggcaatttcccaggtcctattaatgctacctacacttcatattaacctttctgatatagtttttcttttctttgcatgtattgatttagctatgttcttgacggagtaccaagaatgagggagcgccccattggggatctggtagcaggtctaaagcaacttggttcagatgttgactgttttcttggcacaaattgccctcctgttcgggtcaatgctaaaggaggccttccagggggcaaggtaatgtaattaaactttctttttgttttgttagattttgtgttttactcaatttcttggtagtacttctttccctacctaactccgacttctcagattgaccttttttaagaggtggggaatagtgtttcttaagtgaggaaaagagaaagccggggtatgagctttagcatgacatcgtatgtatttgatattgatactgcaaatcaagtgggaatcaagcataaaatagcttcagagggatacattttcttttcttgcatgaagttatacagcataaatgatcagaggtgtctgctgtgtatatgtgtaataagactgttatagttagcaggaatgcaggagataaattatgaagatggtgttgatgaatcttaaaagacaattcagaaaccaaagtttgagtagtaagtgacttttgagaggtgtacttctctcccaaatgagctataagctctaacaaaagtctcaatactaatcagatgcctctctcacgctccatccctttatttagatttcttgatttcttttttataactttcccaacttattccccgcttttccttcacgctaccttctaactgaaataaaatgcaattcttacctggtttctttatggcttgttaattttaataaggatcaagtatagtatgaaagtaattctctttggcattaaggcttttgcattgttgtttgtctaagatcccaatggcaagttcacataagatatctgttggtatatgtataaaataattagtcagttgaacaattttctttttcttggcaaataaactcgtatgatacttcaccgggggagggggggagggggttagatttggtacggtaagtatcctgtgtattatttttcttcagttattttatttagttgcttttttggggttacttttttctccatctaggatcctgtatgttaatgtttcttcacttattttatttagttgcttttttggggttacattttttttcgaggggctactgagttcataagataagggtcttgtgtattaatatgctcttcacttggtgctcgctattggtgtaactgtaattcaggtgtcttcttcactcttaagataaggatgattttatgagaaatgtttccacatgcttggcaccaacttgtttatgtgtagtagtagaagaaattatgtataacatgcatactcagcatggcagtgactagtgaataagaattgaagaaaggaggtaaagttgcatgcaagaaacctataaaaagatgattcattcaaaaccttttgctatagccatgcttacaaattgatcaaattagaacttcaatttcaaagtttgttgttaatgagaagttaagcatagttgtgattttcaatttcacagtcatgaagtaagaaactctctaatattatcgtttcctttttgtaacctgtttgcaggtcaagctctctggatcggttagtagccaatatttaactgcacttctgatggctactcctttgggtcttggagatgtggagattgagatagttgataaattgatttccgtaccgtatgttgaaatgacaataaggttgatggaacgctttggagtatctgttgaacatagtgatagttgggacaggttcttcatccgaggtggtcagaaatacaagtaagtctctcatcttacattacatgtccttttaacgtgtctccattagtagactgaaaacgcatgtaaatgcatcagatctcctggaaaggcatatgttgagggtgacgcttcaagtgctagctacttcctagctggagctgccgtcactggggggactgtgactgtcaagggttgtggaacaagcagtttacaggtataatgttaacccttacccttgacattgttctactaaattctggaggaccctttcaattctgggtgggataagcacgacaatttgac

SEQ ID NO: 15 - DNA, 2013 bp, Amaranthus rudis
aaatgatgcaaattaattgggattacattttgaagattgatattgaaattgagagagagttaaaatgtatggatgagagggttgcaaatcaaatgagacggagggggtagattagcaaaattaataagttatttgaagattgaatttgtaaaataattgatgaatcgggcattacattttgctcatcccatcctacaccaaccccaaaacaattcaacaacaaactctttttactacaccaacccactttctctttgcccaccaaaactttggtttggtaagaactaagccctcttctttctctcccccttctccctcttagaaggctaaaatccacctaactttttcagccaagaacacaaagcgaaattcagagataaagagaaacaataatggctcaagctactgccatcaacaatggtgtccaaactggtcaattgcaccatactttacccaaaacccacttacccaaatcttcaaaaattgttaattttggatcaaacttgagaatttctccaaagttcatgtctttaaccattaaaagagttggtgggcaatcatcaattattcccaagattcaagcttcagttgctgctgcagctgagaagccttcatctgtcccagaaattgtgttacaacccatcaaagagatctctggtaccattcaattgcctgggtcaaagtctctatctaatcgaatccttcttttagctgctttgtctgaggtatttatttctcaactgctaaaactttccaatctctatttgatattggaatttgtattacatattccatcttgttgtaattgcattagtagaaagttatgttttgacctttgttcatttatttgttgaattagtattgttgagaatttgaatgtaattattttttttccaatgtgaatttaatctgattaaatccacctcttatttatgttaagttgcaatgaggtttgccaaacggttatcattgaaggataagtttgcgtacttctgaccctcccaacttcgcgttggtagagccatttaatgttattgggggtgattaaaaagatgtatttgttttgccatttgaaatagtagcgttcgtgattctgttttgggtgtctttatagatatgatatatgggttattcatgtaatgtgaaggtttatgtaatatcttggatgcatgtctggtgttgtttgttgtaaatggttgaatgttgttatttggatacattttttcatccatttttttttccctttttacttggaactggaagagggagggttattgggagtaattgaaaggttgtgagtttgagacagtgcatccaagacgaagaacttgagatagatgttgaaggctaaaccttatcactgcttgaattcattatatatctgaaaattttactatatgcatccgttttgctaataaagtgtttttggactatcatgttttgtgatgcccaagagggtgatattactgtgataaatggaaatatcataataacatctattgttaagtagttttagaggcttttgattggtgcttcggctttggttttacttacctcctagagaagattgattctggttgtgcaatctgaacattatttcatcatggtatgaatatggttcaaaaacaaggctgcatcgcattggacacgttgtgaagatttaaaaaaatcgaattgatatttctagcattgtaaaggcttaaataaactgtattccaggctatattagggatctctcatgcttttgaccgatattaaggtgttacgataaccgcatcactcctgcaatcgtgaccgcatgttttcactctattatgtgttacaagagattagtgttacatgaagtggatcccctgtgattttgttctaggtggacagtgtttttgccgaattttatggcaggatttataaagagattggatattagggatttgaattttttaaaatgtttcccgtactcctatggttttctacacacagtttaccgactgtttatttgaattttttgtttga

SEQ ID NO: 16 - DNA, 1530 bp, Amaranthus rudis
ctgtttatttgaattttttgtttgagaaaaggcttacaggcttgcatatgtatatatgtatatttatgtatttgctttgtggtcaaatgtgctgcatgttgtaatgaaaactctgcccggggatggcaggcttacatgccaaagaaaaagattgtgttccaaaacagaaaatatcccatcggcatcagcctgcaatttttttgggaatggtattaaatcttggaaatcttctcaatttgttcaaaccatgaggatttttccgtaatccaataattagcgcgttgtttcatttgtaaaaattacaatttttaatcatatttctctttagtgaagcaactgattggaaaactttggtatctgtcatgtttctttccaagttaaagtgttcccatgcatcatcttcaaaaatctttcataatgtttttgtacaatattttcgataggaagttcattcatgccaagggttaacaatatgtcacttgtgaatttctaaaatagcagaaaacatattgtgacctgtagagttcatcccaaggtatcctctgtgcgagggatgaaaaaagcctctggtaatttatgctactatcccaagatagtattattagaagtcatttatagccgcgtaagagagccaaggatcattgtaggcttgttctatttccatatcttaatgtagcacccaagtattcctcagcaatatgagtattttaaagtctttcaagtcatacattatctcttggcaatgagtcgtttctggattttgaatgctgccagtccactaacttactgtaatgcaatacgtcattattcagctagtttcttattggaaaaaaaccataaaaatgggaaaagtttgaggtatatttctgtaatccaacttgaggattagctttatcacataaaagctacattgcaagatctattattagtttgaatttgcatcttaagtcttgtttttccttagtgattttttctttaacttgttattcgtttcctgaagtttccagtgtcataactcctaaccacaatcatgctacagggcacaacagtggtcgacaacttgctgtatagtgatgatattctttatatgttggacgctctcagaactcttggtttaaaagtggatgatgataatacagacaaaagggcagtcgtggagggttgtggtggtctgtttcctgttggtaaagatggaaaggaagagattcaacttttccttggaaatgcaggaacagcgatgcgcccattgacagctgcggttgccgttgctggaggaaattcaaggtttgtccaattatatattttatgcgagtgtgatttttgtaatattactttttttgtgttagtttcaatcatgaagctgcttatgcagaagccgtacccctgaaattttcttattttgtatatatcagttggtaattgatgtaagagatttttccgagaggaataaaaatcagggggggcgagtacctataaactgtaacctcaagaatattaaactattgttctatcacattaacttttgatcaa

SEQ ID NO: 17 - DNA, 1145 bp, Amaranthus rudis
ttctcattaccaccgtttattacaatctaccaaacgggccgttaaggttttcttaactaggggtgtttagtttggaggaaagctttttattggaaaactgttttctccatattcctataatgacttgactggatttagattggaaaattagggttgaaaacaatttttccttccattataagcttataattttatagttagatgaaaatcaaatttcattcactttcactccatctcccttgttagcattatcgttttccattaaacaaaacaaaagaaaagtactaatcattaacgtttacctggaaaattatttctaatggtaatgttctccgtcagaccaaacaccttcggaatgaggaagcattatggattaaagaaccttgtgcttggattattttatttgtctataagatgcttgtctagagtgtgcttgtatgtttattaacttatcacgcctcctttgctatcgaagaaatatatataaaaaaaagaattatttcacctgtaagcgtaccccaaatatcgacgcaaaatgcatgtcacatatgtgtaatgaatatgttatgtgaataaacagtggctagctggagagtgaaggaaaccgaacggatgattgccatttgcacagaactgagaaaggttagcagtcttttacattcttgaaggttgtaaatagttcttgagtaaaatatattcaatgtataactgatgttcatttgcattcctatcaatacttccagcttggggcaacagttgaggaaggatctgattactgtgtgatcactccgcctgaaaagctgatacccaccgccatcgaaacttatgacgatcaccgaatggccatggcattctctcttgctgcctgtgctgatgttcccgtcactatccttgatccgggatgtacacgtaaaaccttcccggactactttgatgtcttagaaaagttcgccaagcattgagtagcctatacgagatctataaattgtacgccgaaggttttgatttgagactaatagtagataaaaggctattaaactggctttctgctcgagtaattatgaaattctttgtattatgtttgtaagattttaagtagcttataaattacaatgtactaaagtctagaaataagttatgtatgg

SEQ ID NO: 18 - DNA, 703 bp, Amaranthus rudis
  unsure (1)..(703): unsure at all n locations
tcaagtcagtggtcggtaatgaaacgaataataaatgctagagagagagaaagtatgtgtaccgtaaatggcattgagtgcgggtatttatagaacaataaatgacctggttggttgtcctaggggtattttagtaatttcacccgtaggtgggttgagtcaagacgttgactgggctgattgggccctttgacttagcccataaatttggggctagttgacccaattacaataatgatatttataatatataaagtccgtctctgttattttccaaacatcgaataaagtcagcatcgactctccataaaaaggatccatttcttttagtttgtctaattgggctcataaaatacaaggaacccctttatatttagtaattgattgtgttaaagaaatgcacctcaagaaaatgtttaacttgatagtttgagtcctaatttattttagatatattttgcggctattctttacatacatgaatttgttacgataaagtgtggaggcaatatacatcctatttataaatgattaaaattaatctcggccaagattaggtatagtctcgctcacgactaatcccaattcttcatacaaacttatgccttctacggagtttcacaaattcttgtaagagacggtctctttgaaagatcatntctaattgaactgacccattaaaaaaaatatagagtaaagtaga

SEQ ID NO: 19 - DNA, 231 bp, Amaranthus rudis
gacggtgtctcaggagactagctggcggagtttagcatcaaccgatattgggcattagactcgatcaagacttcataaccgagactccgattctcttcaaaccaatcatcttatttcaacccatgttagtttaagtcatcaaatatcaaccgaataagtttagctaataaaaagaaacggaagataatataatgcattattggaagacagaaatatacttcctccgttcca

SEQ ID NO: 20 - DNA, 208 bp, Amaranthus rudis
taagcttgaacgatgaatagtgtcagtaacgaaaatgtagcaactatttcagaacggaggaagtaatttgaaacaaagagaaaattattgttcttcaagaaaaaggtagataatagtaataaatgaaaagagagaatgaattgtatggttgaaattgagagagagttaaaatgtatggatgagatttaaaggaagtggtgggccatag

SEQ ID NO: 21 - DNA, 94 bp, Amaranthus rudis
aatccaatacgttattttaatcatttatatattgatttatacacgtctaaaaattataaaaaaattaaaataatgaaaatatgcgattagacga

SEQ ID NO: 22 - DNA, 40 bp, Amaranthus rudis
acttgactatattttgtcttacacattagccgcaatatat

SEQ ID NO: 23 - DNA, 3681 bp, Amaranthus rudis
aaagatggaaaggaagagattcaacttttccttggaaatgcaggaacagcgatgcgcccattgacagctgcggttgccgttgctggaggaaattcaaggtttgtccaattatatattttatgcgagtgtgatttttgtaatattacttttttttttgtgctagtttcaatcatgaagctgctaatgcagaagtgttgtaacctcgcgaatattaaactattgtgctatcacattaacttttgatcaaagatgtacactgtgtttgtatagtttatagagctaaagggatggaaggggtcgggagagaagaagaggagaaaagaagaagatcctccatatgtataccaagtgtttgaacggaaggaagaaggaggaaactctacacaatatggagatgaagtttttggatagaagccgcttgagaatgagagttaattcatgtgaaagtctatgagaatgagttcacctgcttaataattttaagctctcaacttctcatcctcttttctttgtcaaaaatatcatgtcttcatgtgataattgcttacataatcgattattttgtaaagcggttgtctctctaaatctctccacttacgaaaataattcttccttgaaggttgaagaaatcccttcatttccttttcctctatttctccacccttcctactttggtgtagcatttagtatccctccatttccatggcctatagtgttagatatattcaaacttaagcatctcatgttttatgtgggttctaattgttatttatatatgcatttccaaggattcaaggtaattcgaaccaatcaagcccaaaacaggatatgaattcttcaacctagtctgaacttgtacatctgaaacatactagttgtaattgaaatatactcaactgtaataggactctcaccttcattgtaggttgccacatagcacgtattgtcgatccacccatccttattatttgacacatcaaataaaggatccactcacgtggaactcctaccctacaaaataaaccatcttcctcatctcatttgtattcacgtagttgcttcctcaatcctacaagtaaaaggagaattgtgattcaacttttggagtttggacctattttactgtcaatcaacgaatattaggacaatcacattggtcgcttggcgcttgaaacatttgatttcctcaaaatcctttgcttcccccaacttttcatccttttctttccacattaaagtaggtgcccgaacctccatagccacaaacttggttgtagacgacatgccaacctttctacctttaataaagataggatttgtaaaagccttgctcttcttagatccttatctttcatagaccattgtcatcttgtacatatcatcaaaagacaagttggtatgtaactcaggcttctcgcacaaattaacatccttctcaccaatgaacctccctagtagaaatgcctctcgtacctcaatatgacaagccctacctctcaaacttccacaaagctatagatcttccatcctgatgcaaggaacttcaacgcacatgtaaatgtggtttgaattttaatgttcaaaggaaaaaacctttgtttcatgtgcatctttatgtcagcatagctattaatcagcttcttttctcttgcactagctatactctatacatttaagccaacaagaagcttgcttcttgagctcaagtttaacaaacttgaaaattcaatttttgggtggagttcttgtcgtaaaaacactccaaacttctctcctattcaagataatcttttgggtgtaaggacatactatctaaattttctacgtcatcttgaagccatggtcatccacctagcaatctgctcaactctcggttcatgtttattcaacatctgtgtgaatagattgatcaagcttgccatctgctcaaggatagttgagttattctcttgtaatactggattcctctcttatgtttttttagtcatcctactatttgctagcaacaaacaatcttacaagaatataagaggggattctcttgtattataaggcactactcagaacctaaggaagtagtatgggtgtcttatttttgtccttgcctcgtaggacataaaagagagttgtatttgtgaatgattcaacataaaccaaaagtatgtaggctcttaggttataccatctcattaatatatgatgaaatcttacgtatattccttcacatatatttgtttctttggggtcatttattgtagcaggtcattgatatggaatgccttagttatggcattattgtacgtgcactgtctcaggagaatagatggactgtttatgctttttcgctatttgatggtaatacaaagattgcaatatttgcaagaccttgctgttcggatatagagcaaaatctattacctcgatgccattaattttgaagggatcgaatgtatccttatccttattcatgataacaaagagattgctttgaagtccttacgtttgaaaatcctggacttcactgaattaatgtaaatttcaggttttctgttgcgtgccatgaaatggaatactttattgcttatgtgctgggaataagtaagcttaagaaggcagtttcccaactcctattaatggcacctacactttatattatcctttctgatgtagtttttcttttccttgcatgtgttgatttagctatgttcttgacggagtaccaagaatgagggagcgccccattggggatttggtagcaggtttgaagcaacttggttcagatgttgactgttttcttggcacaaattgccctcctgttcgggtcaatgctaaaggaggcctaccagggggcaaggtactgtaattatattttctttttgttaagttagattttgtgttttactccatctaattcgatgaatgatgattcatacgtcaatttcttggtagtacttcctttccctacctaactctgacttctctgattgaccttttctgtgacgtggggaatagagtttttattaagtgaggaaaagagaaacccggtgtatgagctttagcatgacagaatatgtatttgatatttatactgcaaattaagttggaatcaagaataaaatagcttcagttggagacagtttcttttcttgcatgaagtttatacagcataaatcatcagaggtgtctgctgtgtatgtgtaatagactgttatagttagcaggaatgcagtagataaaatgaagatggtgttgataaagcttaacagacaattcaaaaaacaaagtttgagtagtaagtagacttttgaaaggcgtgtttctctcccaaatgagctataagttctaacaaaagtttgaatacttatcagatgcctctctcacgctctatcccttaattcagatttcttgatttcttttttataactttcccaacttatttccgcctttttcttcatgccaccttttaactgaaataaaatgcaattcctaccttgtttctttaaggcttgtacattttattaaggacttagtatgaaagtaattctctttgcattaaggcttttgcattgttgtttgtctaagatcccaatggcaagtccacttaagatatctgttggtattaggaatggtcacgtgtccaggaccctgttggacccgccccagacccgccccttttttaag

SEQ ID NO: 24 - DNA, 589 bp, Amaranthus rudis
tgtgtaaaaaacgaaaacccagagaggtgaaacaccggaagacacctaactttttcagctaagcacacaaagcgaaattcagagataaagagaaacaataatggctcaagctactgccatcaacaatggtgtccaaactggtcaattgcaccatactttacccaaaacccacttacccaaatcttcaaaaattgttaattttggatcaaacttgagaatttctccaaagttcatgtctttaaccattaaaagagttggtgggcaatcatcaattattcccaagattcaagcttcagttgctgctgcagctgagaagccttcatctgtcccagaaattgtgttacaacccatcaaagagatctctggtaccattcaattgcctgggtcaaagtctctatctaatcgaatccttcttttagctgctttgtctgaggtatttatttctcaactactaaaactttccaatctctatttgatattggaatttatattatagctgctttggaatttataaaaacaggtatgagtattaaattaaattatcaagttgaagaaagaggatttttgaggggttttaatggtggtggtg

SEQ ID NO: 25 - DNA, 479 bp, Amaranthus rudis
gaaacttatgacgatcaccgaatggccatggcattctctcttgctgcctgtgctgatgttcccgtcactatccttgatccgggatgtacacgtaaaaccttcccggactactttgatgtcttagaaaagttcgccaagcattgagtagcctatacgagatctataaattgtacgccgaaggttttgatttgagactaatagtagataaaaggctattaaactggctttctgctcgagtaattatgaaattctttgtattatgtttgtaagattttaagtagcttataaattacaatgtactaaagtctagaaataagttatgtatgggttatgaattatgatgctgaaatcaatgagaaatgcatacttgaaaggcttgaccttgaatttgtgacctaaagagtggtaactttggagtttccaagtcatgttgtttatcttagtttttttatattgtttattcaaactgtttattttca

SEQ ID NO: 26 - DNA, 473 bp, Amaranthus rudis
ctctaatattatcgtttcctttttgtaacctgtttgcaggtcaagctctctggatcggttagtagccaatatttaactgcacttctgatggctactcctttgggtcttggagatgtggagattgagatagttgataaattgatttccgtaccgtatgttgaaatgacaataaggttgatggaacgctttggagtatctgttgaacatagtgatagttgggacaggttcttcatccgaggtggtcagaaatacaagtaagtctctcatcttatattacatgtccttttaacgtgtctccattagtagactgaaaacgcatgtaaatgcatcagatctcctggaaaggcatatgttgagggtgacgcttcaagtgctagctacttcctagctggagctgccgtcactggggggactgtgactgtcaagggttgtggaacaagcagtttacaggtataatgttaacccttaccctt

SEQ ID NO: 27 - DNA, 417 bp, Amaranthus rudis
tcatattgagttttggcgccaacatagacctaatcaaataatgaaaaatacaaacaacatcatatggtttcttttgtctttatgactagacactctttattattccttgattgggatcttattttgaatggttgtttagcctacacctcatgttcagattttgttcgtataccagacttttcttgattgcgatcttatttgtcccctggattttgcatagggtgatgtaaaatttgccgaagttcttgagaagatgggttgcacggtcacctggacagagaatagcgtaactgttactggaccacccagggaatcatctggaaggaaacatttgcgcgctatcgacgtcaacatgaataaaatgccagatgttgctatgactcttgcagttgttgccttgtatgcagatgggcccac

SEQ ID NO: 28 - DNA, 224 bp, Amaranthus rudis
ttatcacgcctcctttgctatcgaagaaatatatataaaaaaaagaattatttcacctgtaagcgtaccccaaatatcgacgcaaaatgcatgtcacatatgtgtaatgattttttgtgtgaataaacagtggctagctggagagtgaaggaaaccgaacggatgattgccatttgcacagaactgagaaaggttagcagccttttacattcttgaaggttgta

SEQ ID NO: 29 - DNA, 2086 bp, Amaranthus rudis
accaccatcaccattaaaacccctcaaaaatcctctttcttcaacttgataatttaatttaatactcatacctgtttttataacccgtaaatccagtgtaaagctttgttaaattcaagcaaaattgccaatacactatgaaactctcgaagataactgtgtaaaacgaaacccagaggtgaaacaccggaagacaccaactttttcagccaagcaaacaaagcaaattcaaaaaagagaaagaataatggctcaagctactaccatcaacaatggtgtccaaactggtcaattgcaccatattttacccaaaacccacttacccaaatcttcaaaaactcttaattttggatcaaacttgagaatttctccaaagttcatgtctttgaccaataaaagagttggtgggcaatcatcaattgttcccaagattcaagcttctgttgctgctgcagctgagaagccttcatctgtcccagaaattgttttacaacccatcaaagagatctctggtactgttcaattgcctgggtcaaagtctttatccaatcgaatccttcttttagctgctttgtctgagggcacaacagtggtcgacaacttgctgtatagtgatgatattctttatatgttggacgctctcagaactcttggtttaaaagtggaggatgataatacagccaaaagggcagtcgtggagggttgtggtggtctgtttcctgttggtaaagatggaaaggaagagattcaacttttccttggtaatgcaggaacagcgatgcgcccattgacagctgcggttgccgttgctggaggaaattctagttatgtgcttgatggagtgccaagaatgagggagcgccccattggggatctggtagcaggtctaaagcaacttggttcagatgttgactgttttcttggcacaaattgccctcctgttcgggttaatgctaaaggaggccttccagggggcaaggtcaagctctctggatcggttagtagccaatatttaactgcacttctcatggctactcctttgggtcttggagacgtggagattgagatagttgataaattgatttctgtaccgtatgttgaaatgacaataaggttgatggaacgctttggagtatctgtagaacatagtgatagttgggacaggttctacatacgaggtggtcaaaaatacaaatctcctggaaaggcatatgttgagggtgacgcttcaagtgctagctacttcctagctggagccgccgtcactggtgggactgtgactgtcaagggttgtggaacaagcagtttacagggtgatgtaaaatttgccgaagttcttgagaagatgggctgcaaggtcacctggacagagaatagcgtaactgttacgggaccacccagggattcatctggaaggaaacatctgcgcgctgtcgacgtcaacatgaacaaaatgccagatgttgctatgactcttgcagtagttgccttgtatgctgatgggcccactgccatcagagatgtggctagctggagagtgaaggaaaccgaacggatgattgccatttgcacagaactgagaaagcttggggcaacagttgaggaaggatctgattactgtgtgatcactccgcctgaaaagctaaatcccaccgccatcgaaacttatgacgatcaccgaatggccatggcattctctcttgctgcctgtgcagatgttcccgtcactatccttgatccgggatgcacccgtaaaaccttcccggactactttgaagttttagaaaagttcgccaagcattgagtaacatatgggttctttaaattgtacgccaaaggttttgatttgagactaatagtagataaaaggctataaactggctttatgcttgagtaattatgaaattctttgtattatgtttgtaagattttaagtagcttataaattacaatgtactaaagtctagaaataagttatgtatgggttatgaattatgatgctgaaatcaatgagaaatgcatacttgaaaggcgaaaaaaaaaagaaaaaaaaacaaaacatgtcggccgcctcggtctctactga

SEQ ID NO: 30 - DNA, 1960 bp, Amaranthus rudis
ctttggtttggtaagaacttagccctcttctttctctcctctctctctctcagaaggctaaaatccacctaactttttcagccaagaaacaaagcgaaattcagaggtaaagagaaagaataatggctcaagctactaccatcaacaatggtgtccaaactggtcaattgcaccatactttacccaaaacccacttacccaaatcttcaaaaactgttaattttggatcaaactttagaatttctccaaagttcatgtctttaaccaataaaagagttggtgggcaatcatcaattattcccaagattcaagcttcagttgctgctgcagctgagaaaccttcatctgtcccagaaattgtgttacaacccatcaaagagatctctggtaccattcaattgcctgggtcaaagtctctatctaatcgaatccttcttttagctgctttgtctcagggcacaactgtggtcgacaacttgctgtatagtgatgatattctttatatgttggacgctctcagaactcttggtttaaaagtggaggatgataatacagacaaaagggcagtcgtggagggttgtggtggtctgtttcctgttggtaaagatggaaaggaagagattcaacttttccttggaaatgcaggaacagcgatgcgcccattgacagctgcggttgccgttgctggaggaaattcaagctatgttcttgacggagtaccaagaatgagggagcgccccattggggatctggtagcaggtctaaagcaacttggttcagatgttgactgttttcttggcacaaattgccctcctgttcgggtcaatgctaaaggaggccttccagggggcaaggtcaagctctctggatcggttagtagccaatatttaactgcacttctgatggctactcctttgggtcttggagatgtggagattgagatagttgataaattgatttccgtaccgtatgttgaaatgacaataaggttgatggaacgctttggagtatctgttgaacatagtgatagttgggacaggttcttcatccgaggtggtcagaaatacaaatctcctggaaaggcatatgttgagggtgacgcttcaagtgctagctacttcctagctggagccgccgtcactggggggactgtgactgtcaagggttgtggaacaagcagtttacagggtgatgtaaaatttgccgaagttcttgagaagatgggttgcaaggtcacctggacagacaatagcgtaactgttactggaccacccagggaatcatctggaaggaaacatttgcgcgctatcgacgtcaacatgaataaaatgccagatgttgctatgactcttgcagttgttgccttgtatgcagatgggcccaccgccattagagatgtggctagctggagagtgaaggaaaccgaacggatgattgccatttgcacagaactgagaaagcttggggcaacagttgaggaaggatctgattactgtgtgatcactccgcctgaaaagctgatacccaccgccatcgaaacttatgacgatcaccgaatggccatggcattctctcttgctgcctgtgctgatgttcccgtcactatccttgatccgggatgtacacgtaaaaccttcccggactactttgatgtcttagaaaagttcgccaagcattgagtagcctatacgagatctataaattgtacgccgaaggttttgatttgagactaatagtagataaaaggctattaaactggctttctgctcgagtaattatgaaattctttgtattatgtttgtaagattttaagtagcttataaattacaatgtactaaagtctagaaataagttatgtatgggttatgaattatgatgctgaaatcaatgagaaatgcatacttgaaaggcgaaaaaaaaaagaaaaaaaaacaaaacatgtcggccgcctcggtctcta

SEQ ID NO: 31 - DNA, 939 bp, Amaranthus spinosus
catcaacctagaatgcccatattttacatgtttagcattaaccctagaacatgaaacataatgtgggtgttgaaatgctaaatacaataaagtatcaaattgtttagcaggattatcatcacctaaattatcagaactctctaaagggtaccctaaagcttgtttaacctcaaataaataatcatcaatccaaattttatcattttgattaagctttgaagagggtaaacaagaacttaataatgggaattgtttaagggacatttgaggactatttaagaatctttgagctagttttgcatcatctaatggtggtttaaggatgtattttctagggggtgctttttctttggggatattactttttctttcagctagttcttttaggagtctttgagggctagtttttgggagttcttgagggtctatggatgaaacagcaagaatttggtgataatggaaagtgggctggagttttttgatgggaatttggagggaaaatgatgggaaggatgaagtaaaggaaacatcagtggtttttgagatgggtttaaaaggggatgagaggtccattgtaagaagagaaatgagaggaaaaagatggagttttgaggattgttatgggagctttaatggcggattggacgggacgccattgaagttgatggagagtgagaaaatggagggttttagagggttctagtgaagaattgtggaattgggaattgaggataaggttgatggaacgctttggagtatccgtagaacatagtgatagttgggacaggttctacatccgaggtggtcagaaatacaaatctcctggaaaggcatatgtagagggggacgcttctagtgctagctacttcctagcaggagccgccgtcactggtgggactgtgactgtcaagggttgtggaacaagcagtttacagggtg

SEQ ID NO: 32 - DNA, 381 bp, Amaranthus spinosus
tcctgttcgggtcaatgctaaaggaggccttccagggggcaaggtcaagctctctggatcggttagtagccaatatttaactgcacttctcatggctactcctttggggtcttggagacgtggagattgagatagttgataaattgatttctgtaccgtatgttgaaatgacaataaggttgatggaacgctttggagtatccgtagaacatagtgatagttgggacaggttctacatccgaggtggtcagaaatacaaatctcctggaaaggcatatgtagagggggacgcttctagtgctagctacttcctagcaggagccgccgtcactggtgggactgtgactgtcaagggttgtggaacaagcagtttacagggtg

SEQ ID NO: 33 - DNA, 966 bp, Amaranthus thunbergii
cagcgatgcgcccattgacagctgcggttgccgttgctggaggaaattctagttatgtgcttgatggagtgccaagaatgagggagcgccccattggggatctggtagcaggtctaaagcaacttggttcagatgttgactgttttcttggcacaaattgccctcctgttcgggttaatgctaaaggaggccttccagggggcaaggtcaagctctctggatcggttagtagccaatatttaactgcacttctcatggctactcctttgggtcttggagacgtggagattgagatagttgataaattgatttctgtaccgtatgttgaaatgacaataaggttgatggaacgctttggagtatctgtagaacatagtgatagttgggacaggttctacatacgaggtggtcaaaaatacaaatctcctggaaaggcatatgttgagggtgacgcttcaagtgctagctacttcctagctggagccgccgtcactggtgggactgtgactgtcaagggttgtggaacaagcagtttacagggtgatgtaaaatttgccgaagttcttgagaagatgggctgcaaggtcacctggacagagaatagcgtaactgttacgggaccacccagggattcatctggaaggaaacatctgcgcgctgtcgacgtcaacatgaacaaaatgccagatgttgctatgactcttgcagtagttgccttgtatgctgatgggcccactgccatcagagatgtggctagctggagagtgaaggaaaccgaacggatgattgccatttgcacagaactgagaaagcttggggcaacagttgaggaaggatctgattactgtgtgatcactccgcctgaaaagctaaatcccaccgccatcgaaacttatgacgatcaccgaatggccatggcattctctcttgctgcctgtgcagatgttcccgtcactatccttgatc

SEQ ID NO: 34 - DNA, 484 bp, Amaranthus thunbergii
cacccaactttttcagccaacaaacaacgccaaattcagagaaagaataatggctcaagctactaccatcaacaatggtgtccaaactggtcaattgcaccatattttacccaaaacccacttacccaaatcttcaaaaactcttaattttggatcaaacttgagaatttctccaaagttcatgtctttgaccaataaaagagttggtgggcaatcatcaattgttcccaagattcaagcttctgttgctgctgcagctgagaagccttcatctgtcccagaaattgttttacaacccatcaaagagatctctggtactgttcaattgcctgggtcaaagtctttatccaatcgaatccttcttttagctgctttgtctgagggcacaacagtggtcgacaacttgctgtatagtgatgatattctttatatgttggacgctctcagaactcttggtttaaaagtggaggatgataatacagcc

SEQ ID NO: 35 - DNA, 2329 bp, Amaranthus viridis
cccaggagcatccaaatgtttcattaatagcctctcggccatcacaagatcctggatcttttggccaagatactccagtcgctcaaaacagaacctaggatgttcaaacttgtatttcgatggatgtaggaaacatagctggagcccaagtccaagctcgatattccttgcttcagtgatctctggaagtcgatcattctttggcaaaggataacccaatattttcataacttgtggtctgcaatcaaaatcccaaatgtttcctctgaaccgatgcatgcctggaggcacacaagctctaaaaaccctcggatgagcaaaaagagcatcctcgggaggcctataggtagctacatcttgccaattgagttttctgccttcaaattccacagaaacataatcaacatcttcgagctgccttcttttctttggttggcattcttcatcttctggatccatcccaaacacttcaaatagtacacgataaacttccggcatcccataacacaagtatatagcaccaaacaaagcccagaaaacagactttgaagcaggctctttctcagggcgcctcaatttatcaatatcatcaaaaggaaacaccaaattatgcagactagcagctttaatccacttaggtaaaaacctcttccctatcaaagcaaacactctttccctcattggtcctggagactcccttggatatctctgcaagaaaaactccgcaaaccctaattcgagcacgaattgacccaaaaacatcaacctagaatgcccatattttacatgtttagcattaaccctagaacatgaaacataatgtgggtgttgaaatgctaaatacaataaagtatcaaattgtttagcaggattatcatcacctaaattatcagaactctctaaagggtaccctaaagcttgtttaacctcaaacaaataatcatcaatccaaattttatcattttgattaagctttgaagagggtaaacaagaactcaataatgggaattgtttaagggacatttgaggactatttaagaatctttgagctagttttgcgtcatctaatggtggtttaaggatatattttctagggggtgcttttttctttggggatattattttttcctttcagctagttcttttaggagtctttgagggctagttttagggagttcttgagggtctatggatgaaacagctagaatttggtgataatggaaagtgggttggagttttttgatgggaatttggagagaaaatgatgggaaggatgaagtaaaggaaatatcagtggtttttgagatgggtttaaaaggggatgagaggtccattgtaagaagagaaatgagaggaaaaaaaatggagttttgaggattgttatgtgagctttaatggcggattggacgggacgccattgaagttgatggagagtgagaaaatggagggtttttagagggttcgagtgaagaattgtggaattgggaattaaggataaggtgatggaacgctttggagtatctgtagaacatagtgatagttgggacaggttctacatacgaggtggtcaaaaatacaaatctcctggaaaggcatatgttgagggtgacgcttcaagtgctagctacttcctagctggagccgccgtcactggtgggactgtgactgtcaagggttgtggaacaagcagtttacagggtgatgtaaaatttgccgaagttcttgagaagatgggctgcaaggtcacctggacagagaatagcgtaactgttacgggaccacccagggattcatctggaaggaaacatctgcgcgctgtcgacgtcaacatgaacaaaatgccagatgttgctatgactcttgcagtagttgccttgtatgctgatgggcccactgccatcagagatgtggctagctggagagtgaaggaaaccgaacggatgattgccatttgcacagaactgagaaagcttggggcaacagttgaggaaggatctgattactgtgtgatcactccgcctgaaaagctaaatcccaccgccatcgaaacttatgatgatcaccgaatggccatggcattctctcttgctgcctgtgcagatgttcccgtcactatccttgatccgggatgcacccgtaaaaccttcccggactactttgaagttttagaaaagttcgccaagcattgagtaacatatgggttctttaaattgtacgccaaggttttgatttgagactaatagtagataaaaggctataattatgaaattctttgtattatgtttgtaagatttaagtagcttataaattacaatgtactaaagtctag

SEQ ID NO: 36 - DNA, 1746 bp, Amaranthus viridis
acccgaactttttcagccaacaaacaacgctaaattcagagaaagaataatggctcaagctactaccatcaacaatggtgtccaaactggtcaattgcaccatattttacccaaaacccacttacccaaatcttcaaaaactcttaattttggatcaaacttgagaatttctccaaagttcatgtctttgaccaataaaagagttggtgggcaatcatcaattgttcccaagattcaagcttctgttgctgctgcagctgagaagccttcatctgtcccagaaattgttttacaacccatcaaagagatctctggtactgttcaattgcctgggtcaaagtctttatccaatcgaatccttcttttagctgctttgtctgagggcacaacagtggtcgacaacttgctgtatagtgatgatattctttatatgttggacgctctcagaactcttggtttaaaagtggaggatgataatacagccaaaagggcagtcgtggagggttgtggtggtctgtttcctgttggtaaagatggaaaggaagagattcaacttttccttggtaatgcaggaacagcgatgcgcccattgacagctgcggttgccgttgctggaggaaattctagttatgtgcttgatggagtgccaagaatgagggagcgccccattggggatctggtagcaggtctaaagcaacttggttcagatgttgactgttttcttggcacaaattgccctcctgttcgggttaatgctaaaggaggccttccagggggcaaggtcaagctctctggatcggttagtagccaatatttaactgcacttctcatggctactcctttgggtcttggagacgtggagattgagatagttgataaattgatttctgtaccgtatgttgaaatgacaataaggttgatggaacgctttggagtatctgtagaacatagtgatagttgggacaggttctacatacgaggtggtcaaaaatacaaatctcctggaaaggcatatgttgagggtgacgcttcaagtgctagctacttcctagctggagccgccgtcactggtgggactgtgactgtcaagggttgtggaacaagcagtttacagggtgatgtaaaatttgccgaagttcttgagaagatgggctgcaaggtcacctggacagagaatagcgtaactgttacgggaccacccagggattcatctggaaggaaacatctgcgcgctgtcgacgtcaacatgaacaaaatgccagatgttgctatgactcttgcagtagttgccttgtatgctgatgggcccactgccatcagagatgtggctagctggagagtgaaggaaaccgaacggatgattgccatttgcacagaactgagaaagcttggggcaacagttgaggaaggatctgattactgtgtgatcactccgcctgaaaagctaaatcccaccgccatcgaaacttatgatgatcaccgaatggccatggcattctctcttgctgcctgtgcagatgttcccgtcactatccttgatccgggatgcacccgtaaaaccttcccggactactttgaagttttagaaaagttcgccaagcattgagtaacatatgggttctttaaattgtacgccaaggttttgatttgagactaatagtagataaaaggctataattatgaaattctttgtattatgtttgtaagatttaagtagcttataaattacaatgtactaaagtctag

SEQ ID NO: 37 - DNA, 1340 bp, Ambrosia artemisiifolia
gcgtccagtcgatgttaacatgaacaaaatgccagatgttgccatgactcttgcagtcgttgccctttatgccgacggtcccacagccattagggacggtatgattgagcattttacgtctttttaatatttttttctcccacaattggaatttaccacatatccttaaaatataaaaaaatagttgttttagattttatataagacaggtgcgcagcgatgatcacataaaccgacatgtatccatatataaaattgtagatgcaaagacttcccctcggctttgttaaataatagttcataatgacatcattttctcccggtatttggcagtggctagctggagagtaaaagaaaccgaaaggatgattgccatttgcacagaactaagaaaggtacgagtcaatataaccatattactcttaaacagctttcaacccattattgtttaatgctaaaagacgtttttgcatttgtaaccttgttcagttgggagcaacagtcgaagaaggacccgattattgtgtgatcactccaccagagaagttgaacgtgacagccatcgacacatatgatgatcacagaatggccatggcattctcccttgctgcatgcgcagacgttcctgtcactatcaaggaccccggctgcacccgtaagactttcccagactactttgaagttcttgagagattcacaaagcattaaacagaatctttatggctgaaatgctcccttcacctgttgtctttctttacatataattggtctttttttatgttaaggttgtagctttctctgagatggatctgagtgtaattttaaatcttttgcaaaaatatgttagcaatgtatgtttttttgatgcatattaaatgtgctattataataaaagtgtttttttgactcttgaagacataaaggtgtaaccttgatgctcaaattagcatgttgaacatgataacttttaaggggtgtgacacaatgttaagcttttgaatccctcttgcaaaagtcctatgtttgactttggctcctaccggtattatgtgcccagtgcaagtggtgttttacctaatcccgttagttagcactcaacatggtattggtgaggtcctgtgagttttccggtaacatgttcttgtcgtctaaaaaatagcacatggaggcttcaaattattgatctttttatgctgaataagtgtatatgttttgctaacagaagtggcaatgagttgtaaatcttgaaagattagaatggcataaaagtgggcttgaactcatgtgtttctcttgaaccatttttatgctgcttacaatataagattagtggggtctaa

SEQ ID NO: 38 - DNA, 1264 bp, Ambrosia artemisiifolia
ctatataatagtctgtttggactaaaagttgtaaatttaaaaatatttcaggtctcctggaaatgcttatgtcgaaggtgatgcttcaagtgctagttacttccttgctggtgcagcagtcactggtggcactatcactgtagaaggatgtggcacaagtagtttacaggtacattttaccaagaagttcatgtttgttaagaagttcccaaccaatttaaacaatatctccagaacgagtgcatgtattttccttttgattacatacaagtcatgctgtttttctggtttttctttgggttaagggtgatgtaaaatttgctgaggttttggagaatatgggtgccaaagtcacttggactcagaacagtgtcactgttactggaccgccaagaattccggaaggaaggaaacacttgcgtcccgtcgatgttaacatgaacaaaatgccagatgttgccatgactcttgctgttgttgccctttatgctggaactactgtggtagacaatttgttgaacagtgaggatgttcatcatatgcttgttgctttgggaaaacttggattacatgtggaacatgacagtgaaaagaaacaagccattgtagaaggctgcgctggtcggtttccggtggggaaaggggaaggtcaagaaattgagcttttccttgggaatgctggaactgcaatgcgaccacttactgccgctgttactgctgccggtggcaattcaaggtctgttcaattttgatcatttttacaatgtaataatgcaaaaaagtgaccattaaatcaatttacaattcaacagttaaactgagatgtcagcttttcaataaattcttttagttttgtaaacaagtatgctgcattttccatggaaccatctgcttatatgctaatgcactttgttttatatataactatcatgtttttgagctaatgcatgttgttacttatattttagctacatacttgatggcatacctcgaatgagagagagacctattgaggacttggttactggtcttaagcagctcggtgcagacgttgattgcactcttggcacaaattgtccccctgtttatataaatggaaagggtggtcttcctggggggaaaggtacgtctcatatcagttctgttatgcttttgtggtttcatattgttggatgaattgttttgtaaggtcgtcgtggaactgcttcagaaattgcttttctaaggtagatacaggaagccccataagataccactataaatg

SEQ ID NO: 39 - DNA, 910 bp, Ambrosia artemisiifolia
tttttcttccacaattggaatttaccacatatccctaaaatatataaaaaatatagttgttttacattttatacaagacaggtgcgcagcgatgatcatataaaccaacatgtatctatatataaaattgtagatgcaaagacttcccgtcggctttggtaaattaatgacatcatttctcctgatatttggcagtggctagctggagagtaaaagaaaccgaaaggatgattgccatttgcacagaactaagaaaggtacgagttataaccatattactcttaaacagccttcaacccattattgtttaatatgctaaaagactcgtttgcatttgtaacattttcagttgggagcaacagtcgaagagggacccgattattgtgtgatcactccaccagagaagttgaacgtgacagccatcgacacgtatgatgatcacagaatggccatggcattctcccttgcagcatgcgcagacgttcctgtcactatcaaggaccccggctgcacccgtaagactttcccagactactttgaagttcttgaaagattcacaaagcattaaacagaatctttatggctgaaatgctcccttcacctgttgtctttctttacatataaaattggtcctttttttatgttaaggttgtagctttctctgagatggatctgagtgtaattttaaatcttttgcaaaaatatgttagcaatgtatgttttttgatgcatattaaatgtgctattataataaaagtgtttttgactcttgaagacataaaggtgtaaccttgatgccatgggcgaaccttttaaggggcgggagggagcgcccccctcgaattttcgctcagaagttgcgattaaatgtcctatgtttgacttcggctcttaccggtattatgtgccc

SEQ ID NO: 40 - DNA, 732 bp, Ambrosia artemisiifolia
  unsure (1)..(732): unsure at all n locations
aatgaagggtgatgtgaaatttgcggaggttcttggacaaatgggggctgaagtaacatggaccgaaaactctgttacggtgaggggcccaccgagggatgcttctggaaggaaacatttgcgtgctgtagatgtcaacatgaacaaaatgcctgatgttgccatgactcttgccgtggttgctctatatgcagatggtcctaccgccattagagatggtattttcctcaattctgcattttacaaaaaagttttaccagcacaatctagatgcccattttttcggcttttctattcattataatttatatacagtttggttgtttattagcgtgctctctttttgttatttttcagtngctagctggagagtcaaagaaaccgaaaggatgattgccatttgcacagaactcagaaaggtaaaacagcccattatccgatcatagcacttatgaataagtcactatggggtattgttcgcctcaaagaagttaaataaaataaaaaagttannnnnnnnnnnnnnntccaaaaatctctctcaagcaggcatcctccaaaatatttagaagatttagattattatatcgacattaccgcattaatatttataaaaagatggacaaaatactgttatgggtcaacctaatctccattgcccatactaaaacatgacatgtattttgacccgttaccccgtcttgttacctctactcatactcatctaacact

SEQ ID NO: 41 - DNA, 278 bp, Ambrosia artemisiifolia
ttgtttattagcgtgttttctttttgttatttttcagttgctagctggagagtcaaagaaaccgaaaggatgattgccatttgcacagaactcagaaaggtaaaacagcgcattatccgatcatagcacttatgaataagtcactatatatggggtattgttcacctcaaagaagttaaataaaataaaaaattatatgttgaaactctccaaaaatccctctcaagtagacttcctccaaaattggtctaatccccctggcccatactaaaacatga

SEQ ID NO: 42 - DNA, 1503 bp, Ambrosia trifida
  unsure (1)..(1503): unsure at all n locations
atggctnnagctactaccatcaacaatggtgtccaaactggtcaattgcaccatactttacccaaaacccacttacccaaatcttcaaaaactgttaattttggatcaaacttgagaatgtctccaaaatcacttgctgttgcagcttctgttgctaccacagagaagtcatcagttgaagagattgtgttgaagcccattaaagagatttctggaactgttaacttacctggatccaagtctttgtctaatcggatccttcttttagctgctcttgctgagggcacaacagtggtcgacaacttgctgtatagtgatgatattctttatatgttggacgctctcagaactcttggtttaaaagtggaggatgatagtacagccaaaagggcagtcgtagagggttgtggtggtctgtttcctgttggtaaagatggaaaggaagagattcaacttttccttggtaatgcaggaacagcgatgcgcccattgacagctgcggttgccgttgctggaggaaattcaagctacatactagatggtgttccccgaatgagagagagaccaatcggtgatttagtcactggtcttaaacaacttggtgcagatgttgattgtttccttggtacaaattgcccacctgttcgtgtagctgccaatggaggccttcctggtggaaaggtcaaactgtcgggatctattagtagtcaatacttgacggctctgcttatggcagctccgcttgcactgggagatgtagagatagaaattatagataaattaatatctgtaccttatgtagagatgacactgaaattgatggaacggtttggtgtttctgtagaacatagcgatagttgggacaagttttatgtccgaggtggtcaaaagtacaagtcacctggaaatgcttacgtagaaggtgatgcttcaagcgcaagttacttcttagctggtgctgccattaccggcggcaccgttacggtggaaggttgtgggaccagcagtttacagggtgatgtgaaatttgcggaggttcttggacaaatgggggctgaagtaacatggaccgaaaactctgttacggtgaagggcccaccgagggatgcttttggaaggaaacatttgcgtgctgtagatgtcaacatgaacaaaatgcctgatgttgccatgactcttgccgtggttgctctatatgcagatggtcctacagccattagagatgttgctagttggagagtcaaagaaaccgaaaggatgattgccatttgcacagaactcagaaagttgggagcgacagttgaagaagggccagactactgtgtgatcactccaccagagcggttgaatgtggcagcaatagacacgtacgatgatcacaggatggccatggctttctcccttgccgcctgtgcagatgttcctgtcaccatcaaggatcctgcttgcactcgtaagacgtttccagattactttgaagttcttgaaagattcacaaagcat

SEQ ID NO: 43 - DNA, 1465 bp, Ambrosia trifida
gttttggtatgttatccaaccctccgtttttccgcctctagtcaaaatgagctatttctaaatgacttgtttttctgacacacttctatgattctttttagctgaatgaagggtgatgtgaaatttgcggaggttcttggacaaatgggggctgaagtaacatggaccgaaaactctgttacggtgaagggcccaccgagggatgcttttggaaggaaacatttgcgtgctgtagatgtcaacatgaacaaaatgcctgatgttgccatgactcttgccgtggttgctctatatgcagatggtcctacagccattagagatggtactttcatcaattcccaacaacccctagatgcccatttttcggattttctattcattataatttatatgcagtttggttgttaattagcgtgtgctcttttttgttatttttcagttgctagttggagagtcaaagaaaccgaaaggatgattgccatttgcacagaactcagaaaggtaaaacagcccatccttcaaaattggtctatttagaagacttagattattatattgacattaacgcattaatatttataaaaatatggacaaaatattgttatgcgtcgacctaatctccctggcccgtactagaacatgacaagttttttgacccgttacgccgtcttgttacctctgctcatactcatctaacactttacgggtcaacaactttttcagttgggagcgacagttgaagaagggccagactactgtgtgatcactccaccagagcggttgaatgtggcagcaatagacacgtacgatgatcacaggatggccatggctttctcccttgccgcctgtgcagatgttcctgtcaccatcaaggatcctgcttgcactcgtaagacgtttccagattactttgaagttcttgaaagattcacaaagcattaaacagaatctttatggctgaaatgctctctttacctgttgtgtttcacatataattggtcctttttttttatgttaaggttgtagctttctctgagatggatctgagtgtaattttaaatcttttgcaaaaatatgttagcaatgtatgttttttttgatgcatattaaatgtgctattataataaaagtgtttttgattcttgaagacataaaggtgtaaccttgatgctcaaattatgtaacataatgttaagcttttgaatccctcttgcaaatgtcccatgtttgacttcggctcttactggtattatgtgctcagcgcaagtggtgttttacctaattccgttaggtggcactcaacatggtattggtggggttctgtgagttttccggtaacatgttctcattgtttagagaaaaaaaatgcacatggaggcttcaaattgttcatctatttgtgttgaataatttatatgttgctagtagaagtggcaatgagttgtaaatcttgaaagattagaat

SEQ ID NO: 44 - DNA, 1022 bp, Ambrosia trifida
tgtatatatataaaatacatatacaataccaaaacgcctaatttcgcctaattttcgcctagtccctaggctggacctcaccgcctgcctagcgcctagcgccttttgcaaccttgtaaacatcttattaataatgataccttttgtttcatctttatgtaaccttttctggtcttaatatgcaggtcaaactgtcgggatctattagtagtcaatacttgacggctctgcttatggcagctccgcttgcactgggagatgtagagatagaaattatagataaattaatatctgtaccttatgtagagatgacactgaaattgatggaacggtttggtgtttctgtagaacatagcgatagttgggacaagttttatgtccgaggtggtcaaaagtacaagtaagtctgttttttcatgaaagtcatttcctttttgtgaagattggtcgacgggtttatatggtaattatctgtttccaggtcacctggaaatgcttacgtagaaggtgatgcttcaagcgcaagttacttcttagctggtgctgccattaccggcggcaccgttacggtggaaggttgtgggaccagcagtttacaggtgtgatcagtaatcatattcatcagcttcataaagcacatccaaacaccccaaactatctctacttacatctatgcatacgtcatatgatcttaccctttccgtttgttgtttctttaaactagggggatgtaaagtttgctgaggtcctcggacaaatgggtgcagaagtaacatggacagagaactcagtgacggtgaagggcccgccaagaaacgcttccggaaggggacacttgcgtccagtcgatgttaacatgaacaaaatgccagatgttgccatgacgcttgcagtcgttgccctttatgccgacggtcccacagccattagagacggtatgattgagcattttatatctttttttttaatattttttttctcccagaaatcacaattagaatttaccatacattctcaaaata

SEQ ID NO: 45 - DNA, 697 bp, Ambrosia trifida
atattagatttgtgtatttcaaaaatctttttagaaaataaactagtaataatatattcatgacaaaataatattattgtgtgggttggtaagatgttgggggtggttggtgaaggaaatgacactctaaaaagccgccaccaaactccccaccctttcaaaatcttgcttctccacgcaataaattcttcatctttttctctgcaaatcacaaacaaacacaatggcgattcacattaacaacatatccaacttcacaaccaatctcaccaatacccacaaccccaaatcattaccatcatcttttttatcttttggatccaaattcaacaaccccatgaatcttgcatctctttcttccacccaaaccattaataaaagatcacttgctgttgcagcttctgttgctaccacagagaagtcatcagttgaagagattgtgttgaagcccattaaagagatttctggaactgttaacttacctggatccaagtctttgtctaatcggatccttcttttagctgctcttgctgaggtatggttattgttatttgatttgttcataattgtgttttatggttatgtttctcaaaagggtcttgttcaagatttaattttgataagttttttagtgaattttgtgtaattgaattattattttgaattgggtgataatattgtatgatatgtgtgatat

SEQ ID NO: 46 - DNA, 439 bp, Ambrosia trifida
tattaaataaaatgataaaaactatactgttaaaaataataccccaataagcgatatcaaagattataagcatttaaaacaccttacctgattcttttgcccgttttcttttaagctaagttgtaattttttggcggtttcactcattggagatttgtatatttgacctcagatttcatctttttataatatcttaaaaagttttaatatggtttttcagctacatactagatggtgttccccgaatgagagagagaccaatcggtgatttagtcactggtcttaaacaacttggtgcagatgttgattgtttccttggtacaaattgcccacctgttcgtgtagctgccaatggaggccttcctggtggaaaggtaaccaacatttgattgttaattacagtggcgaagtttgacccgaaacttcgggggggtcggaa

SEQ ID NO: 47 - DNA, 436 bp, Ambrosia trifida
atgctacagggcacaacagtggtcgacaacttgctgtatagtgatgatattctttatatgttggacgctctcagaactcttggtttaaaagtggaggatgatagtacagccaaaagggcagtcgtagagggttgtggtggtctgtttcctgttggtaaagatggaaaggaagagattcaacttttccttggtaatgcaggaacagcgatgcgcccattgacagctgcggttgccgttgctggaggaaattcaaggtttgtccaattatattctttatgtgagtgttgttttttgtgttagtctcaatcatgaaggtactaatgcagaagccgtacccctgaaattttcttattttgtatatatcaattggtaattgatgtaagatatttttccgagaggaataaaaaacagggggatatgaagaatattaaagtat

SEQ ID NO: 48 - DNA, 404 bp, Ambrosia trifida
  unsure (1)..(404): unsure at all n locations
gatcagaccggtccactcttgttttaatttgagacaattttgatgttgagtcatcccacaccaaccccaaaaaattcaacaacaaactcttataatgattccctctactctactagagtctacaccaaccgactttctctttgcccaccaaaactttggtttggtaagaactaagcccccttctttcccttctctctcttaaaagcctaaaatccacctaactttttcagccaagaacacaaagcgaaattcagaggtaaagagaaagaataatggctnnagctactaccatcaacaatggtgtccaaactggtcaattgcaccatactttacccaaaacccacttacccaaatcttcaaaaactgttaattttggatcaaacttgagaatgtctccaaagttc

SEQ ID NO: 49 - DNA, 1209 bp, Ambrosia trifida
tgttatgccagccctaattttattcatgtaatcacttccataacacacatccaaagttcccaacaacccctagatgcccatttttcggattttctattcattataatttatatacagtttggttgtttattagcgtgtgctcttttttgttatttttcagttgctagttggagagtcaaagaaaccgaaaggatgattgccatttgcacagaactcagaaaggtacgagtcataataaccatattactcttaaacagcctccaaccgttattttttaacgctaaaagattctttttcatttggaaccttttcagttgggagcaacagtcgaagaaggacccgattattgtgtaatcactccaccagagaagttgaacgtgacagccatcgacacgtatgatgatcacagaatggccatggcattctcccttgctgcatgcgcagacgttcctgtcactatcaaggaccccggctgcacccgtaagactttcccagactactttgaagttcttgaaagattcacaaagcattaaacagaatctttatggctgaaatgctcccttcacctgttgtctttcacatataattggtcctttttttttatgttaaggttgtagctttctctgagatggatctgagtgtaattttaaatcttttgcaaaaatatgttagcaatgtatgatttttgatgcatattaaatgtgctattataataaaagtgtttttgactcttgaagacataaaggtgtaaccttgatgctcaaattagcatgtcacacattataactttcaaggggtgacataatgttaagcttttgaatccctcttgcaaatgtcctatatgtttgaattcggctattaccggtattatgtactcagtgcaagtggtattttacctaattctgttaggtagcactcaacatggtattggtgaggtcctgtgagttttctggtaacatgttctcgtcgtttagataaaaaaaaatgcacatggaggcatcaaattattgatctttttgtgttgaatagtttatatgttgctaatagaagtggcaatgagttgtaaatcttgaaagattagaatatatggcataaaagtgggcttgaactcatgtgtttctcttgaaccatttttatgctgcttacaatataagattagtggggtctaaaagtcacctttacagaattagaggtctaaatgaagtcata

SEQ ID NO: 50 - DNA, 984 bp, Ambrosia trifida
ttattttcttcaatttctttggttgttttgtattttattaaaatttagtggtcaaaacaacattttagcactgatcaaccttttaatggaatgatgcagtgtgtcatgaaccgtaatttgatttataacgataaaataacaacaaatttgtgtttttatgtttacaggttaagctgtcaggatccattagtagccaataccttactgctttgcttatggcttccccccttgcccttggagatgtagaaattgaaattattgataaattaatttctataccctatgttgagatgacaataaaattgatggaacggtttggtgtctcagtcgaacacagtgatagttgggacaggttcttcatcaaaggcggtcaaaagtacaagtaagtctgttttttcatggaagtcattactttttttgtgaagattggtcgacgggtttatatggtaattatctgtttccaggtcacctggaaatgcttacgtagaaggtgatgcttcaagcgcaagttacttcttagctggtgctgccattaccggcggcaccgttacggtggaaggttgtgggacaagcagtttacaggtgcatgatgacttctttttagtttaacttagaaatctctctgacttggaagtcaagtcaatggctataaacggtttttttcacgaaagaaaatatctttgtatatttggtaattttttaataaaattatcacatcttttgtgaactttctaaagaaatataaagttatgttgtttgacgtaacaagtcgcgactaaatgtgtcagtttcaattcaaagtgttaaacttgtcaatctaaagttgtacttaactgataatgggtaaaaacgtgtaatatttagcaattatctaaacgtgaaacgggtgaaatacgttgagcatctaaaagggcaaaaaaatcatctaaagtgcattcaaatgtttacatcatcctagatttagaaataaatcatattgttatg

SEQ ID NO: 51 - DNA, 980 bp, Ambrosia trifida
acttaatgattcagcacttaaccgttcagacctcataatgattcagcactttatcaaccaaacaaccccttagttaataggaatctgtactggttttgcattttacatagcactaacatatgatgaaaagattgctattcgtcatctatttggtacaaacttagttgttcatagttgtttcgactttcgtctatggaaatcatgaaagcttaaatcgatttaaaccattcacggttcgcctccatattgcatgtctgcttatgtattaactgaatgcatgtattttcatgatatgaatatttgatttgatcattgatttgaaatagtgtttttgtcatgagcatatagagttcgaccatttgttatagtgtgaatttgtcaagctataaattcatctacgccacttcagcaaactatttcattgacatttttagccttcagtttatatttaacagatctaagtgaattgatattttcaggggactattgttgtagacaacttattgaatagtgatgatgttcattatatgcttggagctttgagagctctagggttaaatgttgaagaaaatggtgagatcaaaagagcaactgtggaagggtgcggtggtgtgtttccggtgggtaaagaagccaaggatgaaatccagctttttcttggaaatgccggaactgctatgcgttcgttgactgctgcagttactgctgctggtggaaactcaaggtatttttaaataggacactattaataagggtctgcatgtgtcgggtcgggttgttgtattaaataaaatgataaaaactataccgttaaaaataataccctgataagcgatatcaaagattataagcatttaagaacaccttacctgattcttttgcccgttttcttttaagctaagttgtaaatttttggtggtttcactcatcggagatttgtatatttgacctcagatttcatctttttataatatcttaaa

SEQ ID NO: 52 - DNA, 429 bp, Ambrosia trifida
tgatcagtaatcatattcatcagcttcataaagcacatccaaacaccctaaaataagtctacatacatctatgcatacgtcatatgatcttaccctttccttttgttgtttctttaaacaagggggatgtaaagtttgctgaggtccttggacaaatgggtgcagaagtaacctggacagagaactcagtgacagtgaagggcccgccaagaaacgcttccggaaggggacacttgcgtccagtcgatgttaacatgaacaaaatgccagatgttgccatgactcttgcagtcgttgccctttatgccgacggtcccacagccattagagacggtatgattgagcattttatatcttttttttaatatttttttctcccagaaatcacaattagagtttaccaatcattctcaaaataaaaataaaaaa

SEQ ID NO: 53 - DNA, 234 bp, Ambrosia trifida
  unsure (1)..(234): unsure at all n locations
aaagagatttctggaactgttaacttnnnnngatccaagtctttgtctaatcggatccttcttttagttgctcttgctgaggtatggttattgttagttgatttgctcataattgtttttaatgattatgtttctgaaaagggtcttgttcaagatttaattttgataagtttttgagtgaattttgcatatttgaaattattgttttgaattgggttataatattgtatgata

SEQ ID NO: 54 - DNA, 219 bp, Ambrosia trifida
gttttaatatggtttttcagctacatactagatggtgttccccgaatgagagagagaccaattggcgatttagtcactggtcttaaacaacttggtgccgatgttgattgcttccttggtacaaattgcccacctgttcgtgtagctgccaatggaggccttcctggtggaaaggtaaccaacatttgattgttaattacagtggcgaagcttgacccg

SEQ ID NO: 55 - DNA, 26 bp, Ambrosia trifida
actagtttcggggggtcgaaaccgta

SEQ ID NO: 56 - DNA, 1721 bp, Ambrosia trifida
aacaaacacaatggcgattcacattaacaacatatccaacttcacaaccatctcaccaatacccacaaccccaaatcattaccatcatcttttttatcttttggatccaaattcaacaaccccatgaatcttgcatctctttcttgcaaccaaaccattaataaaagatcacttgctgttgcagcttctgttgctaccacagagaagtcctctgttgaagagattgtgttgaagcccattaaagagatttctggaactgttaacttacctggatccaagtctttgtctaatcggatccttcttttagctgctcttgctgaggggactactgttgtagacaacttattgaatagtgacgatgttcattatatgcttggagctttgagagctctagggttaaacgttgaagaaaatggtgagatcaaaagagcaactgtggaagggtgcggtggtgtgtttccggtgggtaaagaagctaaggatgaaatccagctttttctcggaaatgcgggaactgctatgcgtccgttgactgctgcagttactgctgctggtggaaactcaagctacatactagatggtgttccccgaatgagagagagaccaatcggtgatttagtcacaggtcttaaacaacttggtgccgatgttgattgcttccttggtacaaattgcccacctgttcgtgtagctgccaatggaggccttcctggtggaaaggtcaaactgtcgggatctattagtagtcaatacttgacggctctgcttatggcagctccgcttgcactgggagatgtagagatagaaattatagataaattaatatctgtaccttatgtagagatgacactgaaattgatggaacggtttggtgtttctgtagaacatagcgatagttgggacaagttttatgtccgaggtggtcaaaagtacaagtcacctggaaatgcttacgtggaaggtgatgcttcaagcgcaagttacttcttagctggtgctgccattaccggcggcaccgttacggtggaaggttgtgggacaagcagtttacagggggatgtaaagtttgctgaggtcctcggacaaatgggtgcagaagtaacatggacagagaactcagtgacggtgaagggcccgccaagaaacgcttccggaaggggacacttgcgtccagtcgatgttaacatgaacaaaatgccagatgttgccatgacgcttgcagtcgttgccctttatgccgacggtcccacagccattagagacgtggctagctggagagtaaaagaaaccgaaaggatgattgctatttgcacagaactaagaaagttgggagcaacagtcgaagaaggacccgattattgtgtgatcactccaccagagaagttgaacgtgacagccatcgacacgtatgatgatcacagaatggccatggcattctcccttgctgcatgcgcagacgttcctgtcactatcaaggaccccggctgcacgcgtaagaccttcccagactactttgaagttcttgaaagattcacaaagcattaaacagaatctttatggctgaaatgctcccttcacctgttgtctttctttacgtataattggtccttttttttatgttaaggttgtagctttctctgagatggatctgagtgtaattttaaatcttttgcaaaaatatgttagcaatgtatgatttttgatgcatattaaatgtgcta

SEQ ID NO: 57 - DNA, 1689 bp, Ambrosia trifida
tactactacgtgttcttaggtgaaaactcacacacaatggcagctcacgttagcaacgttgctcatatctccaaacatccaattcaatctttaataatctttccaaatcccaaaccccttcttccaagtcctcgcctttcttatcttttggatccaaatacaaaaccccatttacccatttctcttattcatctaataacagaaagcttttcactgtttctgcttctgttgctgccacgtcagcaataccggagatagtgttgcaacccattaaagagatttcgggtactgttaatttgcctggctctaagtctctgtctaatcggattcttcttcttgctgctctttctcagggaacaaccattgttgacaacttacttaacagtgacgatgtccattacatgcttggggctctaagaactctaggtttacgtgttgaggaagatggtgcaattaaaagggcagttgtggaaggttgtggtggtgtttttccggtgggtagagaagctaaagatgaaatacagctttttcttggtaacgcaggaactgctatgcgccctttgactgctgcagttaccgctgctggtggtaattcaagctacatactagatggagttcctcgaatgagagagagaccaataggtgacttagtcacaggtcttaagcagcttggtgcagatgtcgactgtttcctcgggacaaactgcccgcctgtgcgtgtagttggaggtgggggccttcctggcggaaaggttaagctgtcaggatccattagtagccaataccttactgctttgcttatggcttccccccttgccctcggagacgtagaaattgaaattattgataaattaatttctataccctatgttgagatgacaataaaattgatggaacggtttggtgtctcggtcgaacacagtgatagttgggacaggttcttcatcaaaggcggtcaaaagtacaagtcgcccggaaacgcgtacgtagagggtgatgcttcaagtgcaagttacttcttggctggtgctgctataactggtggcaccatcactgttgaaggttgtggaacaagtagcttacagggtgatgtgaaatttgcggaggttcttggacaaatgggggctgaagtaacatggaccgaaaactctgttacggtgaagggcccaccgagggatgcttctggaaggaaacatttgcgtgctgtagatgtcaacatgaacaaaatgcctgatgttgccatgactcttgccgtggttgctctatatgcagatggtcctacagccattagagatgttgctagttggagagtcaaagaaaccgaaaggatgattgccatttgcacagaactcagaaagttgggagcgacagttgaagaagggcctgactactgtgtgatcactccaccagagcggttgaatgtggcagcaatagacacgtatgatgatcacaggatggccatggctttctcccttgccgcctgtgcggatgttcctgtcaccatcaaggatcctgcttgcactcgtaagacgtttccggattactttgaagttcttcagagattcaccaagcattgatgttttcaatagagtttttgttttatttgtaacatgccaaatatgtgatttttggaatattttatttgtaattctttggaagtatgaatgataagatttgagtgtgtatttt

SEQ ID NO: 58 - DNA, 1432 bp, Chenopodium album
tttaagaactcttgggctaaatgtagaggatgataagacagccaaaagggcaattgtggagggttgtggtggtctatttcctgctggtaaagagggagggggtgaagttgaacttttccttggaaatgcaggaacagcaatgcgtccattgacagccgcagttgctgttgccggaggaaagtctagttatgtacttgatggagtgccaagaatgagggagcgacccattggggatttggtagctggtctgaagcaacttggtgctgatgttgactgttttcttggcacggattgtcctcctgtccgggttaatgctaatgggggccttccagggggaaaggtcaagctctcaggatcagttagtagccaatatttgactgcgctgctcatggcaacacctttaggtcttggagacgttgaagttgaaatcattgataaattgatttctgtaccttatgtggagatgacaataaagttgatggaacgttttggtgtgtcagtagagcatagtgctaactgggataggttcttgatccgaggtggtcagaagtacaaatctcctggaaatgcatatgtcgagggtgatgcttcaagtgctagttacttcctagcaggggctgcagtcactggtggaactgtgactgttgagggttgtggaacaagcagtttacagggtgatgtaaaatttgccgaagttcttgagaaaatgggttgcaaggttacctggacagagaacagtgtcactgtaactggaccgcccagggattcatctggaagaaaacacttgcgcgccgttgatgtcaacatgaacaaaatgccagatgtcgctatgactcttgctgttgttgccctttatgcagatgggcccactgccatcagagacgttgctagctggagagtgaaggaaacagaacggatgattgccatttgcacagaactcagaaagcttggggcaaccgttgaggaaggacctgattactgtgtgatcactccacctgagaaactaaacgtgacagccattgacacatatgatgatcaccgaatggccatggcattctctcttgctgcctgtgctgatgttcctgtcaccatcaacgacccagggtgcactcgcaaaaccttcccagactactttgacgttttggaaaggtttgccaagcactgagttgccatctattggttatctagagcatacaaatttgaatcaagattaaaatgctttcagcttcagctttcgccgcattctttgtatcatgtttgtaagattttagtttatacagtgtattaattttgtatcaggccagttagaaataatattcttgaaaagatgaactatgagaatgtgatttagaaactagtattggggtctgaactctacagcaataactgcagagttttgacaccatattttggtaatgtgagttccatactg

SEQ ID NO: 59 - DNA, 15055 bp, Conyza canadensis
  unsure (1)..(15055): unsure at all n locations
tcaacaaaatctttcaccatgtcaaacaacgaaaaccaaagtaacgacctttggaatcactttcaagaaaacccgatgctgagtatgcccctgatgccgcctataccggttatatcatcagctaaccaaggccaaacaagccatgtttcaggctcatccaacccgaccccaatggggagaccagttccgacgggtttgtcgcaatacgacctagaagcacatatgagttatcgccaacacttgcaacagaactatgcaagctcgttttatgcaccaccggcggcaccggggccacaaccgggtcctagccacgacccggaagaggacgaggatgaccagaccgccgacggcgagtagtttttttaaaatactcgtaatgttttatttttctttgcaatgttttatttttaagtgtgttatgtgttttatttttagtggtaatgtttaattgtaatttttttttaatttagttgtaatggttaatttttaataaaattaagtagttttttaagtttgtgtgtaaataaatataaaataaaataaaaaaaataaaaagtgtggaagaggggttatagggagtgattgtggaagaggtggatgaagaaagagaaaagctgacgtgacagtgtggaagagggtaaggatgaggtgctatagggagaggtcttattgagttataatgatgtcaatggcttaataacttaatgacattttggtgatgcgtaagaccttaagaccagaaagtctaagtttgaatcttataaaataggtttttttctattttccaaatttattgagttttctcatgagttcatgtatgagcattattgcatagtgaaaatatggtcagatggtttcatcgatgacaagctaatttttaagaaagatatattacttttctttttaacttgggaaaatcataaaagtgaaatcatcgttttaactttttacgagcatggtactcgcgtaatgcagcggcggtggtatagaagacggtctaatggtggcagtgtcaagtggtgtaggtctatgtgcaccgaaactccaaactgacatagccgtacccatttccgaaactccatggaaacgttttctcttacgaaacacgtatgaaacattccctaaaattttctatagattaaacgtttctttgaagtttccatacggtttctaattaatatcaaggttttaaaggactttttcgaatccccaaacccaaacatgttatattatatacaatttgatcaacattaaattttttatattacaaagccattattaaacactaaacattcaatgagtgatcactaatcaaacatgtattataaagttctacatatataattatacataatctctcaagtctcaaatctcctttatgaaaaaattgatataatttatatttgtatattttttttattgttgtacccgtatcctggattttttagttttactgttccccgttcccgtattgttcccgtacccttttcccgtacctgtttcggtgctacataggtgtaggttgatgtaattgtgatagtgaaaagttttagaagataagagtttaaagtgttaagtattaaaataagggtttatggtgtaaattaattcattaaggggaaaatttataaaactatttctatagtgggtttttattaagagacaatttagtaattttatatgtgacatatgagtaactatttttattttgagaggggtgcataatttttattcgaagagtacggataaaagtcaataaattacgagcagtgaagtatcccagacaccccttgcaaggtaattttttaaaattttattcatggaggtttggtaggaagtggtggtggtggtggttggtatgaaattttgtttttgaccttcttcaaacatccacctactactgacccctcccttcaaacccaacccaaaatccaaatcattaaatccttcaaacccactgtgtgttttgtgtgaaatttcacacacaacaaacaatggcagctactcacattaacaccaccaacattgcccacaatctccaagctaccaccagtctttccaaaacccaaaccccatcaataaagtcacaaccttttttatcttttgggccaaaacacaaaaacccgattgcccatttctctgtttcttctaataataatagaaatcttggaaaaaaatgtttaatagtttctgccgttgccaccaccgagaaaccgtcaacggtgccggaaattgtgttacaacccattaaagaaatctcgggtacggttaatttacccgggtccaagtcgttgtctaatcggatcctcctccttgctgcgcttgctgaggtatagtttaatttggtaataatgtttgacctttaaaatttgacatttgggctacatgattgatatgggtcttgaatgaattgtgttataaaatttgggaagttaaatgttaataatagtttaatcctttagaaattatgaagtaatggttttagaccctgaatttttttttattgcataggttagtcccttagctagttagcttttggttgacatcttagaaaaaccagtacagtttttatattttagtccttaagcttcaattttttgcaatgtattgccatttgaaatgatctagtaaaatgttcaaaatcaatgaattggcggtttaaagatataatgcttggatcaattgttatgtaaagtgtgctaggcggtcaaaagcgaatcttggatcaaggaagtcgtagaatactattgatttcatattattgatttcttattatgcatatttgacatgtgcttctaacatcatggcatttgggatttatttctatatataaagcatgactgtatggttataaagttcaaaacttgtatggtataaatatactcttcttacttcttagcaggaatgtgttgacttataagctgaaaacttttataactccaattgtgtgtagtaatacttgaaagtggctgagttcctaggacagtattacatgcgaacactacaacgtgttactaaatttgagataggtatgatttggttttgttggatacaaagtctaggtcagttaacatagccagttgaggacgatagctttcttgtcttatttcctttttatagagggtttgtgtttcgtgatggtaatattgagtaccaccatatagttcacaagtcatataataaaatcagagcaacattcgaggagtcgcctatatgcatattattgcaccatgctaaaatccaagggcatattttgatgccaatttgtaatttatttctcagggaacgaccattgttgacaacttactcaacagtgatgatgttcattacatgcttggagctttaagaactctagggctaaacgttgaggaggatgttgcaattaaaagggcaattgtggaaggttgtggcggtgtgtttcctgtgggtaaagaagctaaagatgacatacagctttttcttgggaatgcaggaactgctatgcgtccattgactgccgcagttactgctgctggtggtaattcaaggtatttggacgttgtcattgactcattgctatagtaaatatatgttgacttgtgcacacaagatttgaagcatcttttaaacatatatgattagatacagagaacactgcatgttgaaaacttgaaatacaggactttcttaaaatattgggatttcacatatatgggttgaatagttgaaatttcctccttctacctttaaccaattgtatattacttatttaaagttgtgttttaaacatggcgatatgattagatacagagaacactacttattgaaaggtttatgtggtatagtatgaattttaacctcaaaaagggtatctcactatctcttcatatagaagcacacatctgattctgttatatctttatggatcattttttccagctacatactagatggcgttcctcgtatgagagagagaccaataggtgatttggtcacgggtcttaagcagcttggggcagatgttgactgttctctcgggacgaactgccctcccgtgcgtgtagttggtggaggtggtctccctggaggaaaggtattgtgttttcattagtagttgttttctatgcaaatagcaacacaccttatatatcatccatttatagctatttttctaattggggcgtacgttactgtaatttgatcgtccaaccagttgtcatgaccctccttagctaaaatggatgaaagctggtccgacaattgaccataataaatgggtgtgggctatcttgctaaatttaagtatttcacttaaaatgagagttggtttacagtgtgcattcaacctaatttttttttttaacgtcgcatacaacctaaaattgaataatgttgtagacacaaaagctcttagtgagctttaatagtaacattagaggtggtgatatcaatcaaacaataagggaaaagtaatatgtataaaaattagaattaaacaagaagttttaaaaaatagatcaaatggtttgaaagtcttctaaagtgtaatttaatgcataaatcttcctaaattattttatttaaaaactgtattgtaatataattttcatcatcatatttgacattctatgaaaacaaatatacattttgaacaaacagtgttacggatcgacccaggcaattcaaagctgtccattctaacctaaaccagttttcacggttacctctattttcctgcctttcaatttgccagctacaagaagcttcattccaccataacgggttcacgctaaagatgcaaagagtcatgattcgttatttattatcttgacttattatgataacaatagttttggtgtattttgatgtcttcaggttaagttgtcgggatctattagtagtcaataccttactgctctgcttatggcttctccccttgcccttggggacgtggaaattgaaatcatagataaactaatttccataccatatgtcgagatgacactgaaattaatggaacggttcggcgtctcggtagaacatagtgatagttgggaccagttctttattcgaggcggccaaaagtacaagtaagtctatttctttctttttaaagtaaaactggaatttaaaaaggttgcagtttctaccctatctcttgtaatgggttgattcaggttatgtataatctctaatgggtcaaagggggtaaaatacaaaaaggttattttgtcaccaaaacgatatgatgcatattacctagttttcttattggaatagtaaacatttttaatcatttcaatgtacaactcttttatgtgtccacagaaattaaacatagcccctaggactatgttcatcatttccctttataaactagttggagaaaagtattttggccaacccattccgaatttacacattttggcctatcacccagcccgtctgtccactcattttcagggttttgtatggagacccgtttgttaattagttggattaattatcttcaggtcacctggaaatgcttatgtagaaggtgatgcgtcaagtgcgagttacttcttggctggtgctgccataaccggaggcaccatcaccgttgaaggctgcggaacaagtagtctgcaggtgcactttgacctcctttgttttttattcttctcgatttcaatcaaacggctttacggttttacattttaaatggattttgtggaaacaacgagtattaaaagttcatcaaaagattttattattatttttatgcaacaattatcagcatctgtagtgaaatattcagaagtccgtttttagttcaaagtttttctttttaaccttaaagtcaaaagtgagatggcaaatcttttacgtaaaatgattcaattgaggctgtactttggtcgattctgacttaattgggaacataggttacgttagctataagcctataactataagtaagcatgtgtttatatgtcacaatgacttgattaaaagtaaccttatgattttcttagtatacgttagtaatctaacagtatcataataacggacaaaaatgtgctggtggatcagcccacccagcccgttagaacatgacataaaaatgacccaacttgacctatcacctaagctcattataatatgttatccaacccaccctatcttggcacctgtgacctgtattcaaatgtatactgtaagcaacttcctgtttttcttaaacatgtattctgttttttctttccaatgaagggtgatgtgaagtttgcggaggtacttggacaaatgggtgcggaagtaacatggactgagaactcagtcacagttaagggcccaccaagggattcttctggaaggaaacatttacgtgctgttgatgtgaacatgaacaagatgcctgatgttgccatgactcttgctgtggtcgctctttatgctgatggccctacagccattagagatggtatccttccttttaatgtggaaaaaagttcaacatgttttcactaagttttcaaagtaaatagatagatatgacttcaaaataactctattgccatgttaaatcttacacatattgcaagcacattctagtggtggtttggaatggcattatgaaattgaatatctaaaatatttaatttaaacatgttcggtttctgatcatttagggtcagttttaactgaatctcagagaagtcgcgcaagacatgtcacatatttgtttctccgagtctcagacaactgctttttcaaaatgaaagcattctagaactattttgcttacagttgattttctaattctgggtgtacataaatcaagataattacttttataaaacacattcaaaaagcctcctagatgcccctattatgaattttctgtttgctatacgagtatctgctttgtttttgaaaatggtttttttgttttttgccagttgctagctggagagttaaagaaaccgaaaggatgattgccatttgcacagaacttagaaaggtaaaatgatactttgttactctgtgatctatgatactgctattgcttagaggtcactaaagtggtaaggtcaaataggatgggtttgaatgggaacacttttcgcccaaaacatatttaactaatataatttcacttgttactatctaatttcataaatgaaatgatttagaattagaatgttttgggtgtcttgcaacctattcattttaagctattttaattgtcttttgacccattagaaatatacataagaaatatacttaatcagtcctctattgttaatgtttatctggggtgaaatttcttcagttgggagcaacagttgaagaaggtccggactattgtgtgatcactccgccagagaagttaaacgtgacagcaatagacacatatgatgatcacaggatggccatggctttctctcttgccgcttgtgcagatgttcctgtgaccattaaggatccttcttgcacacgtaagacgtttcctgattactttgaagttcttcaaagatttgccaagcattaatgtgattatgggtagtggtttgcttttctatatgtaatttttgtttcatttgtaacgagtaaaatgtgagttttgggcataacatattcttatgaacttgtattctttcgtaagatttttttagtgtaataaaatattttgctatttcagttgatgatttctattacggtaattatgcatctgacttccacttatactacgatgtgcatggctttgcgtgaacagattgccaaacaatttagtcatgtggctggtttgattgcccacacttgttgagttgttggctagtcgagtttgggtgatcagaacccatgtggctcggtttacactttgcgccctaacatgtgtgttttaaaggttaattaaacttattaaacggcttagtaatttaagtcaataaaatcattcaagtttcttttgttcctttggaatgatttaagctaatatgaaaagggtacttttcttagacaaaagtcaaaatgtgaatatttactttcaaatgaactctggttatttacacgagaaatggggcatttttattttgatttttttaaaaaaagatctttcttatttgttatttattgtttagatagtataacacttcaaattaaactaaataaaaataaatacgacgagtagtaaacaagaagaaccaataggaacttcggcattttatgaagcccaaggtgcatgaacctttaagagcatattcttttatcatatttgtaggaaattgtatacatacatacatacattataatattatattgtatatagagaagacaagttatatgtaccatttaagggaaggcatgggacaaggtgccaagattcataaacaaagagaacatggatgcctcgacttgtgactcaaattgctcacatgctttgcatcaatttgatgacttatatataatcttaacgtattataataaccttaaaagtgaaatttaacccatgcttatttttatacctttacaatcttgattataagttaagatcgaagcactttatgttttttgaaaatagtttttccatccaaagatcatctatgtgagtagggacgaaaccagaactttcactgtgagaggacaaatttagaaatcgtatgttatacttaagatcttaagctttttgatgtcttaaactagtcacttgcaaatgcatctactaaattatgtaaaagtagaacctcacttcaactttgtatttttaaaaaaaaattggtatttaaaaaataaggctagtaaatgttaatattaactaaaaaaatcctttaaaaataaatgtttagcttcatttaacaaatttgagattatgtttattctaaaaatatcagaaaggttaaatgctttgaaattttctattactttaatatttgtccataaattaaaaaacctatatataaaatataagggttaaaagggttttctttaaagtaaaagggtcaacataacaatctcaataaagttttgagatttaaaaggaaaaaatctaaaaggcaaggtaacttttgcaaatatgttgtcttcctcccttggtctctacaacagcaaagttacagcaccattaaaacacaaaatgctttatctattgatttatccattgttactacaataataagctcttaatcgtataaagcatggttccgttatcacctatttaggcttttcattcttttttaaaaataaaatccaagtatactttaaaattaaaaaaaaaataattagaatttagcaaaattggactgggggcagttgcccccattgcccgcatactaaatccgtccctgtatgagaggtaaaacatatttttcttgttattgcatatatatactacaaaaaaaaattcatttgtccacatttggttatcgaaattgtgaaaaaatttatgaatttaatcacatttaaaagtgtgtaaaaataatttacataaaatcacaatacttatacacttataaatgtgtaaacaaaatattaacacttaaaagtgtgaacaattgttaaatattttcatacttaaaagtgtgaaagtcaatttgtgacacatgatttcttcacaccctacgtgtataaagaaaataagtgttacaaattaactttcacactttaagtgtgaatacctctatatttttacacacttaaaactatgaacttttctttttcacatgtataagtgtgtaaatattgtgattttttaaatttcttcacactttgaaatgtaaattatacacatttttaaatgtgattaaattaacaaaaatttttacaccttttaaaagtataaaaaaacaagtgtgaggaaatgatatatttgttgtagtgataaaacaatgtaaatatcaatgatattatatcatatcacgaacatgacatgaaaaagataaattatcatattcttaatcggaattataaaaaaaaaaaaaacaaaaaacaaaaactatttctcccttacgcaattttattataaaattcttgcaaatacattaaactataaaaatattgatgaagagtcaagtgaccagtcccttacaatttaattaataatattaaaatcactaaatccctagtttttaaatgatgccttttcatttgtagtcacgttgtttgtaaaggtaatactttattaaaccttaagttagcaaaaaataattaaaaccattcttgttatcatgtcattttcttaattattcaaaatataagcagtgatatagaattgttagattaattttgctattttaataataggaagaaatgtgtggtataaaattgtttttttctttttgtctttttaaaagtgttctaaattaattttttcatatatgtatatatatacaatattatttacaacaaatatacttattttattacataatatatataattatatataacatatacttttgtaaatgattataaattattgtaaatttattactccttagaatagaattattaagtgaaaaaatgcgacatatcatgtgagagttggatgccacatttagtgtcaagttcacatgatcctcgagttttgtccaaccttctttacagataattccacagctacgccttttagatacgcatacaagagttttgtccaaccttttgtgaacaatttttcccccccttttaaacggtaaatacatttttataacataatgttaatggaacttaaactcgtaaatttttggtatgtaccacatcaaatattattagattataaatgtcatttagtttgcgataatatatttttggtaacgatcattcaaaataattgatagaaacaaaaataaaataaaataaaatattgtgtttgctattcgtgaaaagaaatccgtggttcattataaggtaaacaattatatgtgacttgacatatgctatacttcttaaatgacttggatgtattttgttattagatgagttatacttatacacttatatgccttgataatgccttgatattcataacacgcaacaagttactgcttataatttgtgaactacaaatttgactctccaactctccatagtgatttaagaaattgattgatgatgaatatactttaaaattttacctattcatatagttataagaaaaaaagagtaagtgttatttattttgaacacaattttttttttaatacataaaatagtcaaatcgattattttcaagtgtgatatatgtgcatgttatctgattgacgtatcaatgctagctaattaaacattaaattaaatatataaacttataaaggacttaggattgtacttgcataatatatatagttttaaaatgattcttctgatagttttatcatgtccaattgattttgttagttgttaaataataacaataatgataataataaaataaataaaataaataaataataatannaataataataataataatgtttaaggttgcaataacgtgtataaaaaattatatttatatatcaaaagttctctcttgaattttatgataaatgtacattttataacaaaatctttatctttatgaaaaataaaaaactaaattttgatatgattaaaaaaaaaaaaaatgttttagtatgttaggctcaactctcacgtgacatcaaagtcatcaataacttaagtttattttactgtacgaagtccctgcagattgttaaaggtgatcttaaattaaaagcgtaaaagatcaagtcttccatataataaccaatcacaccctaatttttttaccccaaaatcctaataaaattcatgaagatcttgaatattctttcccttttacacctcccccgtttgactttctttaaatgtatacttgagcttgattaatagtccaccctaataaaatctcaccattttcacaccacaattttatttcaaatcttctttcaaactttcactctctgttcttcaccattctctctccaatcaacttttttctgcaaaccacaatcactcccctgttcaagaaacctcaagattccgccattatcaaaaagttttgttctttcttatcttgtttttacattccttacgccaagattcaaaacccacaaacctttcataaaacccaagtcacgtatcaagaatttagcacataaagttggcttcttttttcatcttcaagattacatctttttattcaagatttttgaacaagaatgaagctaatggatgaagatgaaaccccatcaactcctggtaaattcaaaatagataataataaatccatatacattcatcatagattcagatttctacattacaaatctttagccaaacttacattctggtcctttgttttcttgggcttaatcttggtttttttcttcaattcccaatcatcatcatcacaaattgtagatctttctagaagatctttaaaaacaagtacatggggtggacccatatgggaaaaacgggtcaaatcatcagcccggatccgaacccgtaatgggatatccgtattagtcacaggtgcagccgggtttgtagggacacatgtcagtatggccttaaaacggcgtggtgatggtgttttaggtcttgataattttaatgactattatgatccgtcgctaaaaagagctagacagtctttgttagataaaagtgggatttatatagttgaaggtgacttaaacgatgtcgttttgttaaaaaagttgtttgaattagtcccatttagtcatgttatgcatttggctgcacaagctggtgttagatatgctatgcaaaaccctagttcttatattcatagtaatattgctggttttgttaatctgttagaaatttgtaaaaatgctgaccctcaacctgctattgtttgggcttcatctagttcggtttacgggttaaatacgaaagtacccttttcagaaaaggaccggacggatcagcccgcgagtctttatgctgccacgaaaaaggcaggggaagaaatcgcgcatacttataatcatatatacgggctgtcattgacagggttgcgtttttttactgtttacgggccgtggggtaggccggatatggcgtatttcttttttacccgagacattttgaaagggaaaccgatacctatatttgaaggcccaaatcatggaacagtggctagagattttacgtatattgatgatatcgtaaaggggtgtttaggggcgttagatactgcagaaaagagtactgggagcggtgggaaaaagcgcgggccagcccagttacgggtttttaatttgggcaatacgtcgcctgtgcctgtttccgagctagttgggatattggaaaggttgttgaaggttaaggcgaaacgaatggtgatgaaaatgccacgaaatggggatgtgcagtttacgcatgcgaatattagttttgcgaagagggagtttgggtataagccgacaacggatcttcaaagcgggttgaagaaatttgtgagatggtatgttagttactatggaacaggaaagaagactgatcactgatatgattaaaaaagatggaaatttgttacctaaaaaagactaaatttttttgtgttataattcttgttgatttggattctcatattgattgtttttcatgatatgatgatggtaattgtttgatacaaactatattgagactacaaaaggaatatattgttttagttcattatttttgtgtgatgtgtactaataagtaagatttcacatatgtttttgtaggcttattgttttgtggatttcacgaaagttgagtataattcgttagatttctgatctttctgaactcgaatctggcaacattaatcacacgatcaaccacgcctgcttggatacaagcaccatacagaaagtagtatcacgttgaaaatgtccattgttaccactgctttggggttttgcctaatgtccatgttttcattttcgttttttatcgatcttgaacgaatctaaagctaactttagaaaagaactgcagacgcttaacaaaccaacgttagttgttcaaatcggatcaaaatgaacattactggtttcaacccgattctttgtaaacagacattgcaaagagagttgatctgtccaggtagcaattgatatatttattatcacttaaaatcaattaaatgatggtttaatgtacatattttgcaagtcaataaattatgtgacattgtcacgagtacactaccaaacagttggatttgatgttgcttgtgagttgtacataatgcattaaagtatcttcatttggagatgtcgatttccgttatgaaaaacggttggtaagcttttatgtgcaagtatttaagagatgttaacacaatcttttgagttgtcacttaagagtgctaaaggagtttgtatatggtggaacttgtactatcaaatattagtttgtacatattttccctcaaattagtaattaaacgtcaatacttgaatttgaatacgggatttcctcatctcctctttagacaaaagttgtgcttttgatctacgtttgttgcttgaaagtcaaaaccattttttgttggagttgctagggactgttatcatgggtcgtcatacataatcaaaagattgtgatctaatcgagatataaactttgtggtgttgaatgaaatgagccattgtttgtagaatcttagctttgttaccattgagtaagatcatcggataacaattttagcaaatcttggccatctcattaatatacgaaataccattttttatgtaaaataattagttactacgtatatgtacttatcatacaatgaactgacagtaattaagttataaatttgatgtaggtttaggtaaaacctaagaaaagctatattgaatgtgcactttattatgtctagttcatgaacattaaaggagagtaacaaccctcgagcataaatgtgtgtaaagaacatggatgccaaatttactaatttaataatcaatactgtaaaggattattagtattattattactatggggatgggaatataaggttgtcgggtatctaagcttaggtgtagaacactcacatattgttttt

SEQ ID NO: 60 - DNA, 12729 bp, Conyza canadensis
cctttgggtagaggcaagattgtctacatctcacctcccccataccctgctcactgtgttgtttagtttatttaaaggtggaaaggaaaggagatgagaggagaaatatataagatgcattcttaagatttttttaagtgtggaaagggaaggagtagaaaggattagagggggaagttgatatggatctgcgggaagtttatattatttagtaatataatattaattttattattattatgattaggaaagtattgtctttacttagatatcttatgatatcttttatattatttagttagcttgatcatcaagctataggattagtataaaaagaatattagggttgtaattctaaagtatgaaatattaatcagaagtttattgttcttgtttaatcaatttaggagtttactggttctcgaataccagcctatctttgttattgttcttatcatttgatacaagccattggttcgtatcaattggtatcagagcatcgatcttgcaacctgtgcttttcttcaactatggaatcaaggacgatcattgatgttgatgctgatgtacagcaataccgtgaatctactgaggcttgggtggacataatgcatgctcggatcaatcgttttcaagcagccaccgcgcgatctcagttggccactcaacaatttcacttgaggtttacaactaggctggataaacttgaaccagttgtagttgggacacagcagaagttggatgcattggcggcagtggcaaaccagcctctaccccagcaaccgatgattcaggaagttgtcataccaacagtccctacaacttcaccaaaaacaaatcagtttgggttgaagcaatcgaaggtttcacaagcagggtatccttatcccagacaccttcagatcttgcaaggaataatcatcctgatgtgaaccaagaacgaggagctggactaacattcaaggacataagcaatgcttatgaagatctggcaggcgatgaaaagcgatccatatatgacatgaatggggagaatgggcttaaaggtacatgttttggtttaaggaattgtgcaaaagctgatgaactttctggtttgatacatatgattgagtttgttaaacaacttcgatatgatcagcaagctatggagtttcaagtcagaatttgggatcctggaattactcgaaggaacaatttaaagcaacaccttgaggacaaggtgtttttggggtgggagtaatgatatggatctgctggaagtttatattatttagtattataatattaattttattattaatatgattaggaaagtattgtctttacttagatatcttatgatgtcttttatattatttagttagcttgatcatctagctataggattagtataaaaagaatattagggttgtaattctaaagtatgaaatattaatcagaagtttattgttcttgtttaatcaatttaggagtttactggttctcgaataccagcctatctttgttattgtttgatacaagccattggttcgtatcagaagtttagttgttttttgtctcaaaagttttcccctcatttttgaggtgattaggaaggaaaacttctcttccctctcatctcctttcctcccttaagttaactagacattaatgaatattgggtcattttgttgttgtggctataaggaatgacttgacttaaaaacttatagaaatgctgtgttatccagtaagtaatcgtttttttactatttgtcttttaagaccattcattaagcacataaaacaaacaacaatcctgcttaatcgatgtagactacatacatgtagacggacattttatccataaaacagctaattagtcatacataccagttatatgttttacatcgtgcagtgtaaaacttctgcctttactgctaagattttttgtttacatatatattagatatattaaggtttgtattttgatgctaacatttaacattactttttttttttatcggggagtgggttaaagtggttcttctacctggttttagttttttagatgtatatccaatatttattgtgggtaatttaaagttttgaaatttttgtttttttttgtgaacagtataaagtttctgacttttttgattttttgtgaggtaaagtcgtgaatgtgtaatttggtatttgattgatattcttgatattggtacatagtgaggtgcaaggtgctgatggtttcttagacgggtcatgtttgttttgtgtaaaatacatctgtttttttctttgataacaagttatagaagttgcacccaaaaatgttcttgttaaagcgataaaaatttggatagaaggtgacggttaatgattcgatatattgatttgagtttccttttatctattgcattttcacaagttcaacattccaccctcgattttttgatgaatctatgactgaagaaaagggcgattgttgcctttggcaatcagttttggattttattttgtcatggaaagggggtgttagttcctgaaccttagtagaagatgataagctatagtttcaatattgcttttctttcttgcatctgaactggttttgcatttttcaaaggactataaaagatgctatttatcacctatgacctatgttataaatagtaaggtattaaactattaatattggtatagtcttgagaaatccatgaatttcgattgagttcataggacacatctaacttatgtttctttacattacgatttacacatcttgtctttgacgtctgattttaaaatagcgtttctattgacattatgcatttctttgagttctctatataaatttttgtaagctttccatatgtatatactatgaatctgagtgaacttatgctatcaggggactactgttgtagacaacttgttaaacagtgatgatgttcattacatgcttggagctttaagagctctagggttaaatgttgaagaaaatagtgcaattaaaagagcaatcgtagaaggttgtggtggtgtatttcccgtgggtaaagaagccaaggatgaaatccagctttttcttggaaatgcaggaacagctatgcgtccattgactgctgccgttactgctgccggtggaaactcaaggtattttaacttagtgttatattctcctgcattttatgtctgcttcatcctcctacacatacatttcatgacatgtgtacccatttctctcacctcatcatttcatttttctatgtgtcacaattatatgagtaggaggattcatactttcataggcataaattgtaggaatcaaatatcgtttctttttaacctaacatctcttgattagctattataatccgtagaacgtatattaaagttttttgtgccgatatgtaattttaaggtgaatacacaaataaaaattttacctttctgtttgttgcatgttctgtacatataaatttttagtttttgttatatatctaagaatctaagatctctaaatattcttctattagttgacacaaattaagggatcacatgaactgaaaactcaatagcatccacttgttgataatgctgcaatttaatgcccaaagaagaaattattgcaattcttattatcattttatttatgggagacagtgagtatgaatttgggaatcgataatagagttgaccaacttggtggtgctgggtagctaaggtagtgggtaagttacattgatatgtaataccctaacagttatgagttttttcttcagctacatactagatggtgttcctcgaatgagggagaggccaattggtgatctggtcaccggtctaaaacagcttggtgcaaatgttgattgttctctcggtacaaactgcccaccggttcgtgtagttggaagtggaggccttcctggtggaaaggtaatcaacaataagattgctgcattttaaagtcgtaagaattaattatttggttccatatatgattggaaaatttggttatttaagaaactattaattagtaatgaaattatagtttttgaatctttttgtaatcttctttccctggccttcttattgcaggtgaaattgtcaggatctataagtagccaatacttgacttctttgcttatggcggctcctcttgcactgggagacgtagagatagaaattgtagataaattgatctctgtaccatatgtggagatgacacttaagttgatggagcggtttggggtttcagtagaacacagtgatacttgggacagattccatgtccgaggcggtcaaaagtacaagtaagttgatcatttcataaaagtcaatttttacgtgaagatcggtcaacatctattttaatccgataaaatctctttaggtcacctggaaatgcttatgtggaaggtgatgcttcaagtgcgagttacttcttagctggtgctgccatcactggcggaactgtcaccgtggaaggttgcgggacaagcagtttacaggtattatccatgtgcccacctcaaagatattcaaaaactaaattgtttctcaagtatatattcttctagttaattgcaaatttttttgccccatacgtctacccattctataaatttcgtccaaagttggtgactcggttcaatcgtgtaataagtctcttttttgttttttagaattgacaatttatgtcagttcttggttatatcaacgatgtgggagtgtattgtgcacacattctaaaagaaggacatttagtctttttgctttctttttgcctcaagatcatcttcatcttttcaagatactctgcactcatttgcattatcaaagttttggatgcattctgtaactgtggtacaaggagggagacataatatgtcattagttcttattcttaagctcaatgcacactatcacctcttacttcttttttctttctttttttttattagtttatttaagctcaatgcacactaacacttcttctttataacttcaagtcattcattttaatttttgaagctgatggtttttgacattaaagatagaactatgtatatacatatgtcatttcatcttacctatttgcatgtcttgttgatctttaatcagggtgatgtaaaatttgctgaggtccttggacaaatgggtgctgaagtaacctggacagagaactctgtcacggtgaagggtccgccaaggaattcttccggaaggggacacttgcgtccagtagatgtgaacatgaacaaaatgccggatgttgcgatgactcttgctgtggttgccctttatgctgatggccccactgccattagagacggtatgtgttagaattcaccacagctttgtaatgttaaatatatgttagtttagattaacaaaatgactatatgatcacaaaaggaaacatttatctcaaatttggaactaatatagtatcatacctatatagcaattgtagtttcaaagaaatccttaaggtcgtgttgtttattatacatgactgggtatatattgttttttgtgctcaagcttttaaaaatcacatttgactatcctttattgaaaggttaattttgttcatgtctcattttaggcaatttactttttatcaaggaaaaaatagcaatcaatgtctatgtcgtagtttaggcaattaaaacccatcaatcaaagtgctgttggttcaaggcatattagagataaatgagataatagtacgtggatgtcttttcaaaagaagtacaaactttttcttgggctctttagtttttactgaaaataccaaactcctttaactgaattgtctaaaatagaagaaactggaaattagttgctattttgtgaaaacgaaaagtaaatcgccaaaaattggaggttaagtatgcttatattttatgtaattcatctttttgaaaaatgtaagaacttaaatggaagtgaattgatttgaaaaatatatattaaagcaccacttatgaagaaatctagaaattgagttttaggatctgtaaagacatcctgtatattgtatgagaatagatatatcgtacaccacaatccatcatttttacttttcacacgacaaagtgaatatgaaaaatgtgagttaaaacacttaaaagacagttttgggtgtgcaaagtaaaatgtagcacaaattggcccctttctcatattgggtttacatattcttctttacgtatatccctatattgttcattttgtgggccccatctcacgtcggtaaatcattagatggactaaatcatattcttcattccttatattgggcagtggctagctggagagtaaaagaaacggaaaggatgattgccatctgcacagaactaagaaaggtacaagtcattaacccatcttactctaaaaaatagaatggccatgagtacttttaaagtactcaatgaatctgcccattatttgtttagtgctaataggcccttttgcccttggaacttttcagttgggagcaacagtcgaagaaggtccagattattgtgtgatcactccaccagagaaattgaatgtgacagcaatcgacacatacgatgatcacagaatggccatggctttctcgcttgccgcctgtgcagaggttcctgtcaccattaaggacccgggttgcacccgtaagaccttccccgactactttgaagttcttgaaagatacactaagcattaaatcacatataagatgttcagaaagaaaggggttagaggttttaaaatgacacctttacccttcagtccttcaccattatctttcttcagaaatgtttcacttacagagttacatcatatgtatatgggcgacctgagcgtattttatcttttcttttcggtgagtttgtagtttttgttgaggtggaataagtattatcttgaatatttatgctaaatttggttagcaatgtattatttttgatgcataatgtatttgttatattataatgaaaagtgtttttgaatatggccaagatttgtgaaggtgagatgagttttgaaccttatactcagatttagcacatggtgacactaaataattgatcctttattagtgctgaaaataattatatgttaagaaagattggttactaacaaaagtggttatgagtgaaagtggggtttaagtttgaagtcataattctcttgagatgttgatttgaagttgagatgtacgataggggtgtaaaggcacctttgggatataaacaaaatcatggattatcttattccttatacttctattgtatgttaatttttaattcaattttactgaattacttaaatgatattttgaatactataaaaggttggtattactccatatgttatatgagtcagaaatacatttcgtaatttgctctacattatcttaagtaatatttctcttctaaatccaaattactagttaataatatatactagtaaaaatgtagctataagcctataactaaaacctgaaaaatgaaaaagaaaataaacgctatataaattatggattcatgcatgtatctattatataaataaaagaaaattgtgatgacatcatatttattagaaaaaaatctacttggcatcattagacattcacatattaattatttattttttttatttaattgatttatgacatcaatataaataaatagaatttgataattctatattaggaaatatcattacttttaaagattttgtggcactattactctattagacatttatataataatactttctttttttatttaattgatttatttataaataactaaactttaatttttaattcccatattagaaaatatctttagttttaaagatttttgtgtggtaacggttataacttaaatgttcatagagtattataaatgaatatgaaaggtcttacacattttaattcttatatagattgtatatgtgtttataaaaaaaatcacattttgtacaatatcttgaagtttttcttgaattttattaaattttgtgttatatatcaatgggttgaatgttaaataaattttcattatataattttaggtaaattttacattatataattgtcctcaataattatttctttagtttgcccgcgtaatacgcgggttacttagctagtcaagtgataaagttccatttaggtaaaaactaaaaaacatgatagaagagtttacgttaattgtattatttatctaaaaattctatttttagtttcgtaagtttagactgatcgatcatcttgcaactcgatgttatacatggcattttatcttaaaaacttttacccttgtatttttttttttttttttattgtttttctttaaacattcatatctataatcatgaaaagaaataaaataagaattagcgataagccagataaatacaaaaggagaaatttaagtacaaatgaaattttatttcatcttatggtacaatgtaataaaaagttataggaaaatttaacttcagtcctaagattgttgttagcgtgaataaataattatactttttattttaaaattagtttgagcgcgttaagtcgttattggcaacccatagagttgttattagcaatactaaattttttaattgtggatagccaaaattaaatggatgggaatttccaatgacacaccggtctagtgttaagacacatgagattttcttataagtcggaagttcgagtcttgtcaagtacaagctttattcatattaatccccaagtagtctatggtgatttcttttggcattgttgctcggcacggggtagtaggatccggtttagacaaccgaccaaccgctttttgggttaggacctcatcatttgatggtgaaggatatgtttctattcgaaagtcatttgttaaaaaataataaaaatgaataaatgaacggaaattatatgcaccataaccttagaatatactaccaatattccaggtttatacttgtgacttgccaacatttattgttgttgattgtaataatgctcatgtttccttcattcttcttgtatagttccttgaaaaaatttcttgttgttgattgtaactacaatgattaatgtagaagaaacaatggttaaaaaaaaaatgatatttgtaccatttcttttgattgatgtatcataaatgtgcattgttaacttgtacagttagttatacaatttgtacattattatacattaataaaaaatagtgatactaatatcacaaattaagcgttaaaacagtgtggggtggggtctaaaagactaactcagtaatttatgatacttggaaattactcttttcccaattaagcttgcaataagttgaagtttggtggtgtagtagccagcctttttactcttttcacatatatacaaactcacatgatgtaggtgctaccctaaccaacaaagttggggaattttgacaataaaggcattgagtgtttacctaatttacagtcaaaatcttgacacatatgacatatatacattatggcaagaaaaaacaaatatatcctaagtttagaccaacaccatgttgttttaaaatgatattaaatatgtaagttatatacatttctacttattggttttagtggtttatttctatatttgctataaaagtataaattatggttttccaatatgttttgtttagagctttagccgttgaattcatggaagaatgacattttggggtaagttattgacatgaacgggctaacaccttagaaaaaattattgaagtatttatagatgtgtgtaataactcgaagacatgtatcaatgtcaataaataaggtaacgagaggaaaaataaacttatgcatcaacgaataaatgaattaggtattaagatatgataaaattgacatgatgtttactctcttttctttttttccaaaaaaaaaaaattatcgttcatcttgaattaattagttagtttttttttttttttttttgaaaagtaattaattagttactatcacaaagagtgttgaaaaagccctcattcaaatgattattccaattcaggaaaatcttaacacaaagtacacaactaaaaagaggacattaatcaaaacatcatactcaaaacatttgatagtgaacaatagatcaattggctggagtttttttttttttttttttttttcctgatcataagtttgactcttcaaaatgacatacttttaggttttcttttgactaacttataacagcttatgatttacatcttgtaatttaaagtatgtgtagggattcaccattgtatgatgagatatcccctgatatcaaataacaactgactcttgaagaaaaacatactaatcgaaaccaaaaaaaaaaaaagaacgccaaagttgtagatggagttgttcataagcttaaattcctcttgatccagtgggtatctttggtgcaccacgtgaatgctgatttcctcttgaagttattaagcttgtaatgacaacaactatggtttaaaatgattctagaagttaaatactacgaggtagacattttttcatcatttgttagataggcgcattttgaagatcgttcaagtcgtcttcaaaaacgtcctttttacctaatgatcaatcaaggcacgcacctagctatgagatgaatacgttgttgatattccgcttttcgttatcaccattcatctcgacacgacgtatatatctatatatatcccaactctagattatattcataagttcgtatattgatgaactatatatgtgttatgcacatgcaatgcacccataacatggaagaagaattattgctttattcattcatgtggaaaattaggtataatggaatacaatgaaggaacatgacaaaggtgttacccaatcactaaaattgtgtttggcactaatggagcattgcaattgtactttctaaataatccatatctttaatggatggaaagtttcatacttacttattacaatcagtagataaccataaaaatgacattaatattgacctttaattaatagaattttagagtttttaacaaatcttttgtcatggacttcgtatgtaaattggggaaatgcaatttgtcttctatgcaaaatacgaaaccaattagatccaaaaggtatgatgatagtaacatcaatcaatactcatttataaaagaaggtttcctttcattttcaatttttgtgtgctcttaatataaacctcacactaaaaatgacttatcccatactcacatgacatgtctcttaacttccctttcaattagctttttttttcttccactcctttattgcacatctaaaattaatttttaaaaatatgactaatgacttttaatcaattatgggactagttaacttattaaaaaagtatccccttattgaaagttacatagagaaatgtttaaattactctccaaatttaattatataatattttcatctagcaccccttaaaatatattcacataaactatccccttaacattaatgattaagttacactatcaatcgttaatcttttagaatatcttcattaaccctagctataaataaattacttttatatcaattatttacaccacttagcgtcacttccaccaccaacagttgtcccatcatcacaccgtcaccgccacaaccactgctgcattgcgtggatataatgctactataaataataaatagtaagcttgtaaggaaaaagagtgcctcaaatacttttcttataacccatttgcaaaaataatggatatcttagaatggctaaggaataacttatagcatattttttaaaaaaaaataacactttatatttggaagtgttgaaaaatatgtaatatttttatttaacacgccttaaaatatttttacatacactatccgttaacattagtgattaaattacactatcaatcctttattttttaaaatatctccattaactctttacatcaattatctacaccactcgacgtcgccttcactaccaactatcgccaccaccacactgtcatcgtcacgattaccgccgcattacgcaggtaccatgctagttgaatttaactataataactatgaagtgaagttgaattaatcaaagttatgaaagacgaaaaaacttcactcactaaaaacaatagaaaccttattctttttacaagtgaattttacctcaaacgtgtatgatgtatgcaaatcgcacaacgaatgggtcccgcactaagcggatcttaaatagtttttctcaccataacacctccttaattagaaaatatcgtcgaggagaacctaccaaaactcgaactcaagatcttggaataaattctccggaggccccgcatagcaggtttagtgaaacaccactggccataaacgaaatgtaaataatttatttcaaatcgtataaattagaaaaagcaacacgtttggcaaagtttcatttccctggtattatttataagttttcattaatattccaacaactaaaaatggtaatgatgaggagttatcaacgaatgtcaaaactaaattcatttgtatactcacaatcaaatattaatcaaaacaaatctttaatattatatatcatcactagaaactagaaagtaaacatataaaattgagtggtagattatgaaatattatataataacgaccagttaaaaaggttataactaaagggttgtgatcaaatgaatc

SEQ ID NO: 61 - DNA, 2833 bp, Conyza canadensis
aatctaataaaaagaaatttgtaaggaatttgtaagcggaaagtcccctttgtccattttgtaaagacaatgaggaaacaattgactatcttcttactgcttgtcccattgcaaatgtggtattatgtttcctcatggtgccatatacctccactataggcatactaggccaaagagtttttccttacaaaccagctttctcccgaggtctcattaactaaacttagaatcattaatcttatcatcctctcatctggttggcatatttgaaaaactcggaaagataaagtcttttattgtaaagatctaaacccaaattcgaagacataaacattcaacactcatatggttaactgtgagatcaaagtttaaggagctcgactcgaactcctggagctcctttaattgtaatacggtaacttattttgactttggttttgcttgtactttcctaggacaaggagcctaaattttgattggagaaagagatacagtgagagtaggtatgtattttctaaaagacacgtaaacctcaaaaagagcgtgtggtaatgatagggattcttataacttattttgacattttgtaaaaaaaaatatttaaaaagaaagattaattgtcgaacctcatgacagacctaaaaaaccaaaactatatccaactaatctaaaaccttatttgttccataatcggtaaacgttctatcaatagtgtttatatgaagtatacaaagttaagcattgccattgccactaatgatataacaatcttaaccattaattttcattcaatggtcaagatattttcaacatgacgcaagttgagaaatcaacttgagggaatttaaattccgtaaactcagctttatgtagaacaaggtgctgataacgtgtgataagattattgtgaagagaaatatagagaggaagaaattgtatctttcattgagaatggggagggatatatatacacaagtcttggagtaggctccaagataaatgagataaactagaaaatgtaatctctctaaaacatacatgatacacataatcattttcatttacaataattcctttaataatagtcattgaaattaatagtgtcatctccattgaatgtttgacacctgtaaaaaaaaacgttatatattaatcatatacaaaaattaaacaaaatgtgacttttggaaggagtggctagaacacatgctaatgtttgagagattgagtgttcgaatttaggctgcgtttttttatatgacctataagttttatacttttataagataaacacatatacactttgtaatatttttttctttttagtaacatttttgttcgtttattaaatatttgtctaactactgtatttcttttttacattttgttttactttatagtaggtaattttatttttaatactttgttttcttgggatttttaggaatacacatatggtatagttgtgacaaatgtatttgtattgatgtaaaggttacatttgatcaaatgtatagttgtgacaatatttaaacatgagaaaactacggcggtgaatttgtctactttaaaaatatgggttagtggggcgcggtcaatctttctagtttaaaaatatgggttggtaagatgtgtagcgggggcgggggttggtgaaggaaatgacactcttctaaaagccgcctaccaaactcccccaccatcacctcatcacccacctattcattgattcaaatcccacatttactacgtgttttctcaaccaaaatcccccccgcccccccacaaaacacacaatggcagttcacatcaacaactccaacatacccattttcaacacttccaatctcacaacccaaaacccatcttcaaagtcatcatcttttttatcttttggatccaacttcaaaaacccattaaaaaacaataataacaataattatacctctgtttcttgtaatgtgaaaaacaacaaaaacccatttaaagtatcagctttctctgccacttccaccaaagagaagccatctaaagctccagaagaaattgtgttgaaacccattcaagaaatttcgggtacggtccatttacccggatccaagtctttgtctaatcggatcctccttcttgctgccctgtctgaggtatcttttataaattatgttttgaatatttgaatttaattagtgttttgattgattgactagaatttgattattattaagatataggaaaagatatgtacattagtttttgactgaatgtgaaaaatgtcttaatgtagtaactcacaaagttttgtttgtgatctataagtttactttataaggttactctatgggaaaaggttacgtagattttggttttctttgacctctgtagttggtatggccatgagaagaagtaggcctaaaaagagctttgcttgtgagaggacatgaccatacttagaggactaggattagtttagaggaatatggtagatcagtaatccttttaggtattttaggggtagtctatatacttatatgtaggaaggtcaggcatgatacctttcttatatgctcgtatactcgtaattgttgctctcagtccatttgcttggttttatgcaaacggttatgtttattatgtttttatgctgatgtctaatatgttcaaatgtcctatctactatgtattgtccattttgcgctaaagtgtcctacgtggtatgtttgctactcccctttactcttaacgtaggcagctcatacccgaccgacaagtatggtttgcttaactctttacactctcctacttttgcatcatatggccggaggtccttatggaa

SEQ ID NO: 62 - DNA, 15010 bp, Conyza canadensis
aatatcaacaaaatctttcaccatgtcaaacaacgaaaaccaaagtaacgacctttggaatcactttcaagaaaacccgatgctgagtatgcccctgatgccgcctataccggttatatcatcagctaaccaaggccaaacaagccatgtttcaggctcatccaacccgaccccaatggggagaccagttccgacgggtttgtcgcaatacgacctagaagcacatatgagttatcgccaacacttgcaacagaactatgcaagctcgttttatgcaccaccggcggcaccggggccacaaccgggtcctagccacgacccggaagaggacgaggatgaccagaccgccgacggcgagtagtttttttaaaatactcgtaatgttttatttttctttgcaatgttttatttttaagtgtgttatgtgttttatttttagtggtaatgtttaattgtaatgtttttttaatttagttgtaatggttaatttttaataaaattaagtagttttttaagtttgtgtaaatataaaataaaaaaaataaaaagtgtggaagaggggttatagggagtgattgtggaagaggtggatgaagaaagagaaaagctgacgtgacagtgtggaagagggtaaggatgaggtgctatagggagaggtcttattgagttataatgatgtcaatggcttaataacttaatgacattttggtgatgcgtaagaccttaagaccagaaagtctaagtttgaatcttataaaataggtttttttctattttccaaatttattgagttttctcatgagttcatgtatgagcattattgcatagtgaaaatatggtcagatggtttcatcgatgacaagctaatttttaagaaagatatattacttttctttttaacttgggaaaatcataaaagtgaaatcatcgttttaactttttacgagcatggtactcgcgtaatgcagcggcggtggtatagaagacggtctaatggtggcagtgtcaagtggtgtaggtctatgtgcaccgaaactccaaactgacatagccgtacccatttccgaaactccatggaaacgttttctcttacgaaacacgtatgaaacattccctaaaattttctatagattaaacgtttctttgaagtttccatacggtttctaattaatatcaaggttttaaaggactttttcgaatccccaaacccaaacatgttatattatatacaatttgatcaacattaaattttttatattacaaagccattattaaacactaaacattcaatgagtgatcactaatcaaacatgtattataaagttctacatatataattatacataatctctcaagtctcaaatctcctttatgaaaaaattgatataatttatatttgtatattttttttattgttgtacccgtatcctggattttttagttttactgttccccgttcccgtattgttcccgtacccttttcccgtacctgtttcggtgctacataggtgtaggttgatgtaattgtgagagtgaaaatttttagaagacaagagtttaaagtgttaattagtaaaataaaagtttagaatgtaaattaattcattaaggtcaaatttggtattttataaaactcttttcataatgggtgtttattaagagacaatttagtaattttatatgtgacatatgagtaactatttttattttgagaggggtgcataatttttattcgaagagtacggataaaagtcaataaattacgagcagtgaagtatcccagacaccccttgcaaggtaattttttaaaattttattcatggaggtttggtaggaagtggtggtggtggtggttggtatgaaattttgtttttgaccttcttcaaacatccacctactactgacccctcccttcaaacccaacccaaaatccaaatcattaaatccttcaaacccactgtgtgttttgtgtgaaatttcacacacaacaaacaatggcagctactcacattaacaccaccaacattgcccacaatctccaagctaccaccagtctttccaaaacccaaaccccatcaataaagtcacaaccttttttatcttttgggccaaaacacaaaaacccgattgcccatttctctgtttcttctaataataatagaaatcttggaaaaaaatgtttaatagtttctgccgttgccaccaccgagaaaccgtcaacggtgccggaaattgtgttacaacccattaaagaaatctcgggtacggttaatttacccgggtccaagtcgttgtctaatcggatcctcctccttgctgcgcttgctgaggtatagtttaatttggtaataatgtttgacctttaaaatttgacatttgggctacatgattgatatgggtcttgaatgaattgtgttataaaatttgggaagttaaatgttaataatagtttaatcctttagaaattatgaagtaatggttttagaccctgaatttttttttattgcataggttagtcccttagctagttagcttttggttgacatcttagaaaaaccagtacagtttttatattttagtccttaagcttcaattttttgcaatgtattgccatttgaaatgatctagtaaaatgttcaaaatcaatgaattggcggtttaaagatataatgcttggatcaattgttatgtaaagtgtgctaggcggtcaaaagcgaatcttggatcaaggaagtcgtagaatactattgatttcatattattgatttcttattatgcatatttgacatgtgcttctaacatcatggcatttgggatttatttctatatataaagcatgactgtatggttataaagttcaaaacttgtatggtataaatatactcttcttacttcttagcaggaatgtgttgacttataagctgaaaacttttataactccaattgtgtgtagtaatacttgaaagtggctgagttcctaggacagtattacatgcgaacactacaacgtgttactaaatttgagataggtatgatttggttttgttggatacaaagtctaggtcagttaacatagccagttgaggacgatagctttcttgtcttatttcctttttatagagggtttgtgtttcgtgatggtaatattgagtaccaccatatagttcacaagtcatataataaaatcagagcaacattcgaggagtcgcctatatgcatattattgcaccatgctaaaatccaagggcatattttgatgccaatttgtaatttatttctcagggaacgaccattgttgacaacttactcaacagtgatgatgttcattacatgcttggagctttaagaactctagggctaaacgttgaggaggatgttgcaattaaaagggcaattgtggaaggttgtggcggtgtgtttcctgtgggtaaagaagctaaagatgacatacagctttttcttgggaatgcaggaactgctatgcgtccattgactgccgcagttactgctgctggtggtaattcaaggtatttggacgttgtcattgactcattgctatagtaaatatatgttgacttgtgcacacaagatttgaagcatcttttaaacatatatgattagatacagagaacactgcatgttgaaaacttgaaatacaggactttcttaaaatattgggatttcacatatatgggttgaatagttgaaatttcctccttctacctttaaccaattgtatattacttatttaaagttgtgttttaaacatggcgatatgattagatacagagaacactacttattgaaaggtttatgtggtatagtatgaattttaacctcaaaaagggtatctcactatctcttcatatagaagcacacatctgattctgttatatctttatggatcattttttccagctacatactagatggcgttcctcgtatgagagagagaccaataggtgatttggtcacgggtcttaagcagcttggggcagatgttgactgttctctcgggacgaactgccctcccgtgcgtgtagttggtggaggtggtctccctggaggaaaggtattgtgttttcattagtagttgttttctatgcaaatagcaacacaccttatatatcatccatttatagctatttttctaattggggcgtacgttactgtaatttgatcgtccaaccagttgtcatgaccctccttagctaaaatggatgaaagctggtccgacaattgaccataataaatgggtgtgggctatcttgctaaatttaagtatttcacttaaaatgagagttggtttacagtgtgcattcaacctaatttttttttttaacgtcgcatacaacctaaaattgaataatgttgtagacacaaaagctcttagtgagctttaatagtaacattagaggtggtgatatcaatcaaacaataagggaaaagtaatatgtataaaaattagaattaaacaagaagttttaaaaaatagatcaaatggtttgaaagtcttctaaagtgtaatttaatgcataaatcttcctaaattattttatttaaaaactgtattgtaatataattttcatcatcatatttgacattctatgaaaacaaatatacattttgaacaaacagtgttacggatcgacccaggcaattcaaagctgtccattctaacctaaaccagttttcacggttacctctattttcctgcctttcaatttgccagctacaagaagcttcattccaccataacgggttcacgctaaagatgcaaagagtcatgattcgttatttattatcttgacttattatgataacaatagttttggtgtattttgatgtcttcaggttaagttgtcgggatctattagtagtcaataccttactgctctgcttatggcttctccccttgcccttggggacgtggaaattgaaatcatagataaactaatttccataccatatgtcgagatgacactgaaattaatggaacggttcggcgtctcggtagaacatagtgatagttgggaccagttctttattcgaggcggccaaaagtacaagtaagtctatttctttctttttaaagtaaaactggaatttaaaaaggttgcagtttctaccctatctcttgtaatgggttgattcaggttatgtataatctctaatgggtcaaagggggtaaaatacaaaaaggttattttgtcaccaaaacgatatgatgcatattacctagttttcttattggaatagtaaacatttttaatcatttcaatgtacaactcttttatgtgtccacagaaattaaacatagcccctaggactatgttcatcatttccctttataaactagttggagaaaagtattttggccaacccattccgaatttacacattttggcctatcacccagcccgtctgtccactcattttcagggttttgtatggagacccgtttgttaattagttggattaattatcttcaggtcacctggaaatgcttatgtagaaggtgatgcgtcaagtgcgagttacttcttggctggtgctgccataaccggaggcaccatcaccgttgaaggctgcggaacaagtagtctgcaggtgcactttgacctcctttgttttttattcttctcgatttcaatcaaacggctttacggttttacattttaaatggattttgtggaaacaacgagtattaaaagttcatcaaaagattttattattatttttatgcaacaattatcagcatctgtagtgaaatattcagaagtccgtttttagttcaaagtttttctttttaaccttaaagtcaaaagtgagatggcaaatcttttacgtaaaatgattcaattgaggctgtactttggtcgattctgacttaattgggaacataggttacgttagctataagcctataactataagtaagcatgtgtttatatgtcacaatgacttgattaaaagtaaccttatgattttcttagtatacgttagtaatctaacagtatcataataacggacaaaaatgtgctggtggatcagcccacccagcccgttagaacatgacataaaaatgacccaacttgacctatcacctaagctcattataatatgttatccaacccaccctatcttggcacctgtgacctgtattcaaatgtatactgtaagcaacttcctgtttttcttaaacatgtattctgttttttctttccaatgaagggtgatgtgaagtttgcggaggtacttggacaaatgggtgcggaagtaacatggactgagaactcagtcacagttaagggcccaccaagggattcttctggaaggaaacatttacgtgctgttgatgtgaacatgaacaagatgcctgatgttgccatgactcttgctgtggtcgctctttatgctgatggccctacagccattagagatggtatccttccttttaatgtggaaaaaagttcaacatgttttcactaagttttcaaagtaaatagatagatatgacttcaaaataactctattgccatgttaaatcttacacatattgcaagcacattctagtggtggtttggaatggcattatgaaattgaatatctaaaatatttaatttaaacatgttcggtttctgatcatttagggtcagttttaactgaatctcagagaagtcgcgcaagacatgtcacatatttgtttctccgagtctcagacaactgctttttcaaaatgaaagcattctagaactattttgcttacagttgattttctaattctgggtgtacataaatcaagataattacttttataaaacacattcaaaaagcctcctagatgcccctattatgaattttctgtttgctatacgagtatctgctttgtttttgaaaatggtttttttgttttttgccagttgctagctggagagttaaagaaaccgaaaggatgattgccatttgcacagaacttagaaaggtaaaatgatactttgttactctgtgatctatgatactgctattgcttagaggtcactaaagtggtaaggtcaaataggatgggtttgaatgggaacacttttcgcccaaaacatatttaactaatataatttcacttgttactatctaatttcataaatgaaatgatttagaattagaatgttttgggtgtcttgcaacctattcattttaagctattttaattgtcttttgacccattagaaatatacataagaaatatacttaatcagtcctctattgttaatgtttatctggggtgaaatttcttcagttgggagcaacagttgaagaaggtccggactattgtgtgatcactccgccagagaagttaaacgtgacagcaatagacacatatgatgatcacaggatggccatggctttctctcttgccgcttgtgcagatgttcctgtgaccattaaggatccttcttgcacacgtaagacgtttcctgattactttgaagttcttcaaagatttgccaagcattaatgtgattatgggtagtggtttgcttttctatatgtaatttttgtttcatttgtaacgagtaaaatgtgagttttgggcataacatattcttatgaacttgtattctttcgtaagatttttttagtgtaataaaatattttgctatttcagttgatgatttctattacggtaattatgcatctgacttccacttatactacgatgtgcatggctttgcgtgaacagattgccaaacaatttagtcatgtggctggtttgattgcccacacttgttgagttgttggctagtcgagtttgggtgatcagaacccatgtggctcggtttacactttgcgccctaacatgtgtgttttaaaggttaattaaacttattaaacggcttagtaatttaagtcaataaaatcattcaagtttcttttgttcctttggaatgatttaagctaatatgaaaagggtacttttcttagacaaaagtcaaaatgtgaatatttactttcaaatgaactctggttatttacacgagaaatggggcatttttattttgatttttttaaaaaaagatctttcttatttgttatttattgtttagatagtataacacttcaaattaaactaaataaaaataaatacgacgagtagtaaacaagaagaaccaataggaacttcggcattttatgaagcccaaggtgcatgaacctttaagagcatattcttttatcatatttgtaggaaattgtatacatacatacatacattataatattatattgtatatagagaagacaagttatatgtaccatttaagggaaggcatgggacaaggtgccaagattcataaacaaagagaacatggatgcctcgacttgtgactcaaattgctcacatgctttgcatcaatttgatgacttatatataatcttaacgtattataataaccttaaaagtgaaatttaacccatgcttatttttatacctttacaatcttgattataagttaagatcgaagcactttatgttttttgaaaatagtttttccatccaaagatcatctatgtgagtagggacgaaaccagaactttcactgtgagaggacaaatttagaaatcgtatgttatacttaagatcttaagctttttgatgtcttaaactagtcacttgcaaatgcatctactaaattatgtaaaagtagaacctcacttcaactttgtatttttaaaaaaaaattggtatttaaaaaataaggctagtaaatgttaatattaactaaaaaaatcctttaaaaataaatgtttagcttcatttaacaaatttgagattatgtttattctaaaaatatcagaaaggttaaatgctttgaaattttctattactttaatatttgtccataaattaaaaaacctatatataaaatataagggttaaaagggttttctttaaagtaaaagggtcaacataacaatctcaataaagttttgagatttaaaaggaaaaaatctaaaaggcaaggtaacttttgcaaatatgttgtcttcctcccttggtctctacaacagcaaagttacagcaccattaaaacacaaaatgctttatctattgatttatccattgttactacaataataagctcttaatcgtataaagcatggttccgttatcacctatttaggcttttcattcttttttaaaaataaaatccaagtatactttaaaattaaaaaaaaataattagaatttagcaaaattggactgggggcagttgcccccattgcccgcatactaaatccgtccctgtatgagaggtaaaacatatttttcttgttattgcatatatatactacaaaaaaaaattcatttgtccacatttggttatcgaaattgtgaaaaaatttatgaatttaatcacatttaaaagtgtgtaaaaataatttacataaaatcacaatacttatacacttataaatgtgtaaacaaaatattaacacttaaaagtgtgaacaattgttaaatattttcatacttaaaagtgtgaaagtcaatttgtgacacatgatttcttcacaccctacgtgtataaagaaaataagtgttacaaattaactttcacactttaagtgtgaatacctctatatttttacacacttaaaactatgaacttttctttttcacatgtataagtgtgtaaatattgtgattttttaaatttcttcacactttgaaatgtaaattatacacatttttaaatgtgattaaattaacaaaaatttttacaccttttaaaagtataaaaaaacaagtgtgaggaaatgatatatttgttgtagtgataaaacaatgtaaatatcaatgatattatatcatatcacgaacatgacatgaaaaagataaattatcatattcttaatcggaattataaaaaaaaaaaaaacaaaaaacaaaaactatttctcccttacgcaattttattataaaattcttgcaaatacattaaactataaaaatattgatgaagagtcaagtgaccagtcccttacaatttaattaataatattaaaatcactaaatccctagtttttaaatgatgccttttcatttgtagtcacgttgtttgtaaaggtaatactttattaaaccttaagttagcaaaaaataattaaaaccattcttgttatcatgtcattttcttaattattcaaaatataagcagtgatatagaattgttagattaattttgctattttaataataggaagaaatgtgtggtataaaattgtttttttctttttgtctttttaaaagtgttctaaattaattttttcatatatgtatatatatacaatattatttacaacaaatatacttattttattacataatatatataattatatataacatatacttttgtaaatgattataaattattgtaaatttattactccttagaatagaattattaagtgaaaaaatgcgacatatcatgtgagagttggatgccacatttagtgtcaagttcacatgatcctcgagttttgtccaaccttctttacagataattccacagctacgccttttagatacgcatacaagagttttgtccaaccttttgtgaacaatttttcccccccttttaaacggtaaatacatttttataacataatgttaatggaacttaaactcgtaaatttttggtatgtaccacatcaaatattattagattataaatgtcatttagtttgcgataatatatttttggtaacgatcattcaaaataattgatagaaacaaaaataaaataaaataaaatattgtgtttgctattcgtgaaaagaaatccgtggttcattataaggtaaacaattatatgtgacttgacatatgctatacttcttaaatgacttggatgtattttgttattagatgagttatacttatacacttatatgccttgataatgccttgatattcataacacgcaacaagttactgcttataatttgtgaactacaaatttgactctccaactctccatagtgatttaagaaattgattgatgatgaatatactttaaaattttacctattcatatagttataagaaaaaaagagtaagtgttatttattttgaacacaattttttttttaatacataaaatagtcaaatcgattattttcaagtgtgatatatgtgcatgttatctgattgacgtatcaatgctagctaattaaacattaaattaaatatataaacttataaaggacttaggattgtacttgcataatatatatagttttaaaatgattcttctgatagttttatcatgtccaattgattttgttagttgttaaataataacaataatgataataataaaataaataaaataaataaataataataataataataataataataatgtttaaggttgcaataacgtgtataaaaaattatatttatatatcaaaagttctctcttgaattttatgataaatgtacattttataacaaaatctttatctttatgaaaaataaaaaactaaattttgatatgattaaaaaaaaaaaaaatgttttagtatgttaggctcaactctcacgtgacatcaaagtcatcaataacttaagtttattttactgtacgaagtccctgcagattgttaaaggtgatcttaaattaaaagcgtaaaagatcaagtcttccatataataaccaatcacaccctaatttttttaccccaaaatcctaataaaattcatgaagatcttgaatattctttcccttttacacctcccccgtttgactttctttaaatgtatacttgagcttgattaatagtccaccctaataaaatctcaccattttcacaccacaattttatttcaaatcttctttcaaactttcactctctgttcttcaccattctctctccaatcaacttttttctgcaaaccacaatcactcccctgttcaagaaacctcaagattccgccattatcaaaaagttttgttctttcttatcttgtttttacattccttacgccaagattcaaaacccacaaacctttcataaaacccaagtcacgtatcaagaatttagcacataaagttggcttcttttttcatcttcaagattacatctttttattcaagatttttgaacaagaatgaagctaatggatgaagatgaaaccccatcaactcctggtaaattcaaaatagataataataaatccatatacattcatcatagattcagatttctacattacaaatctttagccaaacttacattctggtcctttgttttcttgggcttaatcttggtttttttcttcaattcccaatcatcatcatcacaaattgtagatctttctagaagatctttaaaaacaagtacatggggtggacccatatgggaaaaacgggtcaaatcatcagcccggatccgaacccgtaatgggatatccgtattagtcacaggtgcagccgggtttgtagggacacatgtcagtatggccttaaaacggcgtggtgatggtgttttaggtcttgataattttaatgactattatgatccgtcgctaaaaagagctagacagtctttgttagataaaagtgggatttatatagttgaaggtgacttaaacgatgtcgttttgttaaaaaagttgtttgaattagtcccatttagtcatgttatgcatttggctgcacaagctggtgttagatatgctatgcaaaaccctagttcttatattcatagtaatattgctggttttgttaatctgttagaaatttgtaaaaatgctgaccctcaacctgctattgtttgggcttcatctagttcggtttacgggttaaatacgaaagtacccttttcagaaaaggaccggacggatcagcccgcgagtctttatgctgccacgaaaaaggcaggggaagaaatcgcgcatacttataatcatatatacgggctgtcattgacagggttgcgtttttttactgtttacgggccgtggggtaggccggatatggcgtatttcttttttacccgagacattttgaaagggaaaccgatacctatatttgaaggcccaaatcatggaacagtggctagagattttacgtatattgatgatatcgtaaaggggtgtttaggggcgttagatactgcagaaaagagtactgggagcggtgggaaaaagcgcgggccagcccagttacgggtttttaatttgggcaatacgtcgcctgtgcctgtttccgagctagttgggatattggaaaggttgttgaaggttaaggcgaaacgaatggtgatgaaaatgccacgaaatggggatgtgcagtttacgcatgcgaatattagttttgcgaagagggagtttgggtataagccgacaacggatcttcaaagcgggttgaagaaatttgtgagatggtatgttagttactatggaacaggaaagaagactgatcactgatatgattaaaaaagatggaaatttgttacctaaaaaagactaaatttttttgtgttataattcttgttgatttggattctcatattgattgtttttcatgatatgatgatggtaattgtttgatacaaactatattgagactacaaaaggaatatattgttttagttcattatttttgtgtgatgtgtactaataagtaagatttcacatatgtttttgtaggcttattgttttgtggatttcacgaaagttgagtataattcgttagatttctgatctttctgaactcgaatctggcaacattaatcacacgatcaaccacgcctgcttggatacaagcaccatacagaaagtagtatcacgttgaaaatgtccattgttaccactgctttggggttttgcctaatgtccatgttttcattttcgttttttatcgatcttgaacgaatctaaagctaactttagaaaagaactgcagacgcttaacaaaccaacgttagttgttcaaatcggatcaaaatgaacattactggtttcaacccgattctttgtaaacagacattgcaaagagagttgatctgtccaggtagcaattgatatatttattatcacttaaaatcaattaaatgatggtttaatgtacatattttgcaagtcaataaattatgtgacattgtcacgagtacactaccaaacagttggatttgatgttgcttgtgagttgtacataatgcattaaagtatcttcatttggagatgtcgatttccgttatgaaaaacggttggtaagcttttatgtgcaagtatttaagagatgttaacacaatcttttgagttgtcacttaagagtgctaaaggagtttgtatatggtggaacttgtactatcaaatattagtttgtacatattttccctcaaattagtaattaaacgtcaatacttgaatttgaatacgggatttcctcatctcctctttagacaaaagttgtgcttttgatctacgtttgttgcttgaaagtcaaaaccattttttgttggagttgctagggactgttatcatgggtcgtcatacataatcaaaagattgtgatctaatcgagatataaactttgtggtgttgaatgaaatgagccattgtttgtagaatcttagctttgttaccattgagtaagatcatcggataacaattttagcaaatcttggccatctcattaatatacgaaataccattttttatgtaaaataattagttactacgtatatgtacttatcatacaatgaactgacagtaattaagttataaatttgatgtaggtttaggtaaaacctaagaaaagctatattgaatgtgcactttattatgtctagttcatgaacattaaaggagagtaacaaccctcgagcataaatgtgtgtaaagaacatggatgccaaatttactaatttaataatcaatactgtaaaggattattagtattattattactatggggatgggaatataaggttg

SEQ ID NO: 63 - DNA, 12222 bp, Conyza canadensis
caatttaggagtttactggttctcgaataccagcctatctttgttattgtttgatacaagccattggttcgtatcagaagtttagttgttttttgtctcaaaagttttcccctcatttttgaggtgattaggaaggaaaacttctcttccctctcatctcctttcctcccttaagttaactagacattaatgaatattgggtcattttgttgttgtggctataaggaatgacttgacttaaaaacttatagaaatgctgtgttatccagtaagtaatcgtttttttactatttgtcttttaagaccattcattaagcacataaaacaaacaacaatcctgcttaatcgatgtagactacatacatgtagacggacattttatccataaaacagctaattagtcatacataccagttatatgttttacatcgtgcagtgtaaaacttctgcctttactgctaagattttttgtttacatatatattagatatattaaggtttgtattttgatgctaacatttaacattactttttttttttatcggggagtgggttaaagtggttcttctacctggttttagttttttagatgtatatccaatatttattgtgggtaatttaaagttttgaaatttttgtttttttttgtgaacagtataaagtttctgacttttttgattttttgtgaggtaaagtcgtgaatgtgtaatttggtatttgattgatattcttgatattggtacatagtgaggtgcaaggtgctgatggtttcttagacgggtcatgtttgttttgtgtaaaatacatctgtttttttctttgataacaagttatagaagttgcacccaaaaatgttcttgttaaagcgataaaaatttggatagaaggtgacggttaatgattcgatatattgatttgagtttccttttatctattgcattttcacaagttcaacattccaccctcgattttttgatgaatctatgactgaagaaaagggcgattgttgcctttggcaatcagttttggattttattttgtcatggaaagggggtgttagttcctgaaccttagtagaagatgataagctatagtttcaatattgcttttctttcttgcatctgaactggttttgcatttttcaaaggactataaaagatgctatttatcacctatgacctatgttataaatagtaaggtattaaactattaatattggtatagtcttgagaaatccatgaatttcgattgagttcataggacacatctaacttatgtttctttacattacgatttacacatcttgtctttgacgtctgattttaaaatagcgtttctattgacattatgcatttctttgagttctctatataaatttttgtaagctttccatatgtatatactatgaatctgagtgaacttatgctatcaggggactactgttgtagacaacttgttaaacagtgatgatgttcattacatgcttggagctttaagagctctagggttaaatgttgaagaaaatagtgcaattaaaagagcaatcgtagaaggttgtggtggtgtatttcccgtgggtaaagaagccaaggatgaaatccagctttttcttggaaatgcaggaacagctatgcgtccattgactgctgccgttactgctgccggtggaaactcaaggtattttaacttagtgttatattctcctgcattttatgtctgcttcatcctcctacacatacatttcatgacatgtgtacccatttctctcacctcatcatttcatttttctatgtgtcacaattatatgagtaggaggattcatactttcataggcataaattgtaggaatcaaatatcgtttctttttaacctaacatctcttgattagctattataatccgtagaacgtatattaaagttttttgtgccgatatgtaattttaaggtgaatacacaaataaaaattttacctttctgtttgttgcatgttctgtacatataaatttttagtttttgttatatatctaagaatctaagatctctaaatattcttctattagttgacacaaattaagggatcacatgaactgaaaactcaatagcatccacttgttgataatgctgcaatttaatgttccaaaaaagaaattattgcaattcttattatcattttatttatgggagacagtgagtatgaatttgggaatcgataatagagttgaccaacttggtggtgctgggtagctaaggtagtgggtaagttacattgatatgtaataccctaacagttatgagttttttcttcagctacatactagatggtgttcctcgaatgagggagaggccaattggtgatctggtcaccggtctaaaacagcttggtgcaaatgttgattgttctctcggtacaaactgcccaccggttcgtgtagttggaagtggaggccttcctggtggaaaggtaatcaacaataagattgctgcacttttaaagtcgtaagaattaattattcggttccatattggttttggcaaatttggttatttaagaaactattagatagtaatgaacttatagtttttgaatctttccgtaaccttttttccatgcccttcttattgcaggtgaaattgtcaggatctataagtagtgtatacttgacttctttgctcatggcagctccccttgcactgggagacgtagagatagaaattatagataaattgatctctgtgccatatgtacggatgacactgaagttgatgcaacggtttggggtttcagtagaacacagtgatactttggacagattccatgtccgaggcggtcaaaagtacaagtaagttgatcattccataaaagtcaatctttacgtgaagatgggtcaacagctattttagtctgataaaatctctttaggtcgcctggaaatgcttatgtggaaagtgatgcttcaagtgcgagttacttcttagctggtgctgccatcactggcggaactgtcaccgtggaaggttgcgggacaagcagtttacaggtattatccatgtgcccacctcaaagatattcaaaaactaaattgtttctcaagtatatattcttctagttaattgcaaatttttttgccccatacgtctacccattctataaatttcgtccaaagttggtgactcggttcaatcgtgtaataagtctcttttttgttttttagaattgacaatttatgtcagttcttggttatatcaacgatgtgggagtgtattgtgcacacattctaaaagaaggacatttagtctttttgctttctttttgcctcaagatcatcttcatcttttcaagatactctgcactcatttgcattatcaaagttttggatgcattctgtaactgtggtacaaggagggagacataatatgtcattagttcttattcttaagctcaatgcacactatcacctcttacttcttttttctttctttttttttattagtttatttaagctcaatgcacactaacacttcttctttataacttcaagtcattcattttaatttttgaagctgatggtttttgacattaaagatagaactatgtatatacatatgtcatttcatcttacctatttgcatgtcttgttgatctttaatcagggtgatgtaaaatttgctgaggtccttggacaaatgggtgctgaagtaacctggacagagaactctgtcacggtgaagggtccgccaaggaattcttccggaaggggacacttgcgtccagtagatgtgaacatgaacaaaatgccggatgttgcgatgactcttgctgtggttgccctttatgctgatggccccactgccattagagacggtatgtgttagaattcaccacagctttgtaatgttaaatatatgttagtttagattaacaaaatgactatatgatcacaaaaggaaacatttatctcaaatttggaactaatatagtatcatacctatatagcaattgtagtttcaaagaaatccttaaggtcgtgttgtttattatacatgactgggtatatattgttttttgtgctcaagcttttaaaaatcacatttgactatcctttattgaaaggttaattttgttcatgtctcattttaggcaatttactttttatcaaggaaaaaatagcaatcaatgtctatgtcgtagtttaggcaattaaaacccatcaatcaaagtgctgttggttcaaggcatattagagataaatgagataatagtacgtggatgtcttttcaaaagaagtacaaactttttcttgggctctttagtttttactgaaaataccaaactcctttaactgaattgtctaaaatagaagaaactggaaattagttgctattttgtgaaaacgaaaagtaaatcgccaaaaattggaggttaagtatgcttatattttatgtaattcatctttttgaaaaatgtaagaacttaaatggaagtgaattgatttgaaaaatatatattaaagcaccacttatgaagaaatctagaaattgagttttaggatctgtaaagacatcctgtatattgtatgagaatagatatatcgtacaccacaatccatcatttttacttttcacacgacaaagtgaatatgaaaaatgtgagttaaaacacttaaaagacagttttgggtgtgcaaagtaaaatgtagcacaaattggcccctttctcatattgggtttacatattcttctttacgtatatccctatattgttcattttgtgggccccatctcacgtcggtaaatcattagatggactaaatcatattcttcattccttatattgggcagtggctagctggagagtaaaagaaacggaaaggatgattgccatctgcacagaactaagaaaggtacaagtcattaacccatcttactctaaaaaatagaatggccatgagtacttttaaagtactcaatgaatctgcccattatttgtttagtgctaataggcccttttgcccttggaacttttcagttgggagcaacagtcgaagaaggtccagattattgtgtgatcactccaccagagaaattgaatgtgacagcaatcgacacatacgatgatcacagaatggccatggctttctcgcttgccgcctgtgcagaggttcctgtcaccattaaggacccgggttgcacccgtaagaccttccccgactactttgaagttcttgaaagatacactaagcattaaatcacatataagatgttcagaaagaaaggggttagaggttttaaaatgacacctttacccttcagtccttcaccattatctttcttcagaaatgtttcacttacagagttacatcatatgtatatgggcgacctgagcgtattttatcttttcttttcggtgagtttgtagtttttgttgaggtggaataagtattatcttgaatatttatgctaaatttggttagcaatgtattatttttgatgcataatgtatttgttatattataatgaaaagtgtttttgaatatggccaagatttgtgaaggtgagatgagttttgaaccttatactcagatttagcacatggtgacactaaataattgatcctttattagtgctgaaaataattatatgttaagaaagattggttactaacaaaagtggttatgagtgaaagtggggtttaagtttgaagtcataattctcttgagatgttgatttgaagttgagatgtacgataggggtgtaaaggcacctttgggatataaacaaaatcatggattatcttattccttatacttctattgtatgttaatttttaattcaattttactgaattacttaaatgatattttgaatactataaaaggttggtattactccatatgttatatgagtcagaaatacatttcgtaatttgctctacattatcttaagtaatatttctcttctaaatccaaattactagttaataatatatactagtaaaaatgtagctataagcctataactaaaacctgaaaaatgaaaaagaaaataaacgctatataaattatggattcatgcatgtatctattatataaataaaagaaaattgtgatgacatcatatttattagaaaaaaatctacttggcatcattagacattcacatattaattatttattttttttatttaattgatttatgacatcaatataaataaatagaatttgataattctatattaggaaatatcattacttttaaagattttgtggcactattactctattagacatttatataataatactttctttttttatttaattgatttatttataaataactaaactttaatttttaattcccatattagaaaatatctttagttttaaagatttttgtgtggtaacggttataacttaaatgttcatagagtattataaatgaatatgaaaggtcttacacattttaattcttatatagattgtatatgtgtttataaaaaaaatcacattttgtacaatatcttgaagtttttcttgaattttattaaattttgtgttatatatcaatgggttgaatgttaaataaattttcattatataattttaggtaaattttacattatataattgtcctcaataattatttctttagtttgcccgcgtaatacgcgggttacttagctagtcaagtgataaagttccatttaggtaaaaactaaaaaacatgatagaagagtttacgttaattgtattatttatctaaaaattctatttttagtttcgtaagtttagactgatcgatcatcttgcaactcgatgttatacatggcattttatcttaaaaacttttacccttgtatttttttttttttttttattgtttttctttaaacattcatatctataatcatgaaaagaaataaaataagaattagcgataagccagataaatacaaaaggagaaatttaagtacaaatgaaattttatttcatcttatggtacaatgtaataaaaagttataggaaaatttaacttcagtcctaagattgttgttagcgtgaataaataattatactttttattttaaaattagtttgagcgcgttaagtcgttattggcaacccatagagttgttattagcaatactaaattttttaattgtggatagccaaaattaaatggatgggaatttccaatgacacaccggtctagtgttaagacacatgagattttcttataagtcggaagttcgagtcttgtcaagtacaagctttattcatattaatccccaagtagtctatggtgatttcttttggcattgttgctcggcacggggtagtaggatccggtttagacaaccgaccaaccgctttttgggttaggacctcatcatttgatggtgaaggatatgtttctattcgaaagtcatttgttaaaaaataataaaaatgaataaatgaacggaaattatatgcaccataaccttagaatatactaccaatattccaggtttatacttgtgacttgccaacatttattgttgttgattgtaataatgctcatgtttccttcattcttcttgtatagttccttgaaaaaatttcttgttgttgattgtaactacaatgattaatgtagaagaaacaatggttaaaaaaaaaatgatatttgtaccatttcttttgattgatgtatcataaatgtgcattgttaacttgtacagttagttatacaatttgtacattattatacattaataaaaaatagtgatactaatatcacaaattaagcgttaaaacagtgtggggtggggtctaaaagactaactcagtaatttatgatacttggaaattactcttttcccaattaagcttgcaataagttgaagtttggtggtgtagtagccagcctttttactcttttcacatatatacaaactcacatgatgtaggtgctaccctaaccaacaaagttggggaattttgacaataaaggcattgagtgtttacctaatttacagtcaaaatcttgacacatatgacatatatacattatggcaagaaaaaacaaatatatcctaagtttagaccaacaccatgttgttttaaaatgatattaaatatgtaagttatatacatttctacttattggttttagtggtttatttctatatttgctataaaagtataaattatggttttccaatatgttttgtttagagctttagccgttgaattcatggaagaatgacattttggggtaagttattgacatgaacgggctaacaccttagaaaaaattattgaagtatttatagatgtgtgtaataactcgaagacatgtatcaatgtcaataaataaggtaacgagaggaaaaataaacttatgcatcaacgaataaatgaattaggtattaagatatgataaaattgacatgatgtttactctcttttctttttttccaaaaaaaaaaaattatcgttcatcttgaattaattagttagtttttttttttttttaattagttactatcacaaagagtgttgaaaaagccctcattcaaatgattattccaattcaggaaaatcttaacacaaagtacacaactaaaaagaggacattaatcaaaacatcatactcaaaacatttgatagtgaacaatagatcaattggctggagtttttttttttttttttttattcctgatcataagtttgactcttcaaaatgacatacttttaggttttcttttgactaacttataacagcttatgatttacatcttgtaatttaaagtatgtgtagggattcaccattgtatgatgagatatcccctgatatcaaataacaactgactcttgaagaaaaacatactaatcgaaaccaaaaaaaaaaaaagaacgcaaagttgtagatggagttgttcataagcttaaattcctcttgatccagtgggtatctttggtgcaccacgtgaatgctgatttcctcttgaagttattaagcttgtaatgacaacaactatggtttaaaatgattctagaagttaaatactacgaggtagacattttttcatcatttgttagataggcgcattttgaagatcgttcaagtcgtcttcaaaaacgtcctttttacctaatgatcaatcaaggcacgcacctagctatgagatgaatacgttgttgatattccgcttttcgttatcaccattcatctcgacacgacgtatatatctatatatatcccaactctagattatattcataagttcgtatattgatgaactatatatgtgttatgcacatgcaatgcacccataacatggaagaagaattattgctttattcattcatgtggaaaattaggtataatggaatacaatgaaggaacatgacaaaggtgttacccaatcactaaaattgtgtttggcactaatggagcattgcaattgtactttctaaataatccatatctttaatggatggaaagtttcatacttacttattacaatcagtagataaccataaaaatgacattaatattgacctttaattaatagaattttagagtttttaacaaatcttttgtcatggacttcgtatgtaaattggggaaatgcaatttgtcttctatgcaaaatacgaaaccaattagatccaaaaggtatgatgatagtaacatcaatcaatactcatttataaaagaaggtttcctttcattttcaatttttgtgtgctcttaatataaacctcacactaaaaatgacttatcccatactcacatgacatgtctcttaacttccctttcaattagctttttttttcttccactcctttattgcacatctaaaattaatttttaaaaatatgactaatgacttttaatcaattatgggactagttaacttattaaaaaagtatccccttattgaaagttacatagagaaatgtttaaattactctccaaatttaattatataatattttcatctagcaccccttaaaatatattcacataaactatccccttaacattaatgattaagttacactatcaatcgttaatcttttagaatatcttcattaaccctagctataaataaattacttttatatcaattatttacaccacttagcgtcacttccaccaccaacagttgtcccatcatcacaccgtcaccgccacaaccactgctgcattgcgtggatataatgctactataaataataaatagtaagcttgtaaggaaaaagagtgcctcaaatacttttcttataacccatttgcaaaaataatggatatcttagaatggctaaggaataacttatagcatattttttaaaaaaaaataacactttatatttggaagtgttgaaaaatatgtaatatttttatttaacacgccttaaaatatttttacatacactattctcttaatattaataattaaattacactatcaatcctttatttttctaaaatatctccattaaccttttaaatcaattatctacaccactcgacgtcgccttcactaccaactatcgccaccaccacactgtcatcgtcacgattaccgccgcattacgcaggtaccatgctagttgaatttaactataataactatgaagtgaagttgaattaatcaaagttatgaaagacgaaaaaacttcactcactaaaaacaatagaaaccttattctttttacaagtgaattttacctcaaacgtgtatgatgtatgcaaatcgcacaacgaatgggtcccgcactaagcggatcttaaatagtttttctcaccataacacctccttaattagaaaatatcgtcgaggagaacctaccaaaactcgaactcaagatcttggaataaattctccggaggccccgcatagcaggtttagtgaaacaccactggccataaacgaaatgtaaataatttatttcaaatcgtataaattagaaaaagcaacacgtttggcaaagtttcatttccctggtattatttataagttttcattaatattccaacaactaaaaatggtaatgatgaggagttatcaacgaatgtcaaaactaaattcatttgtatactcacaatcaaatattaatcaaaacaaatctttaatattatatatcatcactagaaactagaaagtaaacatataaaattgagtggtagattatgaaatattatataataacgaccagttaaaaaggttataactaaagggttgtgatcaaatgaatctaataaaaatagtggatatcaaggacttaatcacagccataggatcagatgaaataaatggtccagattagattttaaaaaaacacacggaggggtaaaatggtaaatttacctcctatgctcacctaacattatataacagatccagaatcccaatcaaaaccctaaaaataaaaacaaatcgtgaaatcaaatggagatttctccggcgatcaaatcgtgaaatcaaacaatcgtgatatcaaatcgtgatatcaaatcgtgaaattccgactaataacaataaaaaactccggcgatctggaatctgtgagcggtggtacagctaattgacataatctttgttgataatcttcaataattcagtgatggaatcaatagaagaattagttatggaatcaaaagaacatgatgtttccgacgacgagattattgaagatgaagaagggatatttgcagacgaggaagaagacaacacaggtacataaccaatcaaagttgattttacatataatcgttgatttcacataggaatatagtttttcagcttgaagtaacatgcctaataaaatcaaagttgattgtacataggaatatagcttttctgcttacaatcaaagttgattgtacataggaatatagcttttatgcttacaatcaaggttgattctacatatgcatgtaaattttgtgtttgaactaatctggctaatccaatcaagttgattgtacataggaatatagcttttgtacttacaatcaaagctgattgtacataggaatatagcttttgtgcttacaatcaaggttgattgtacatatgcatctaaattttgtgtttgaactaacctgcctaatccaatcaagttgattgtacataggaatgtagcttttgtgcttacaatcagagttgattgtacataggaatgttaattttctccttgaagtaacctgcctaatcagatcaaa

SEQ ID NO: 64 - DNA, 1882 bp, Conyza canadensis
atggaggtttggtaggaagtggtggtggtggtggttggtatgaaattttgtttttgaccttcttcaaacatccacctactactgacccctcccttcaaacccaacccaaaatccaaatcattaaatccttcaaacccactgtgtgttttgtgtgaaatttcacacacaacaaacaatggcagctactcacattaacaccaccaacattgcccacaatctccaagctaccaccagtctttccaaaacccaaaccccatcaataaagtcacaaccttttttatcttttgggccaaaacacaaaaacccgattgcccatttctctgtttcttctaataataatagaaatcttggaaaaaatgtttaatagtttctgccgttgccaccaccgagaaaccgtcaacggtgccggaaattgtgttacaacccattaaagaaatctcgggtacggttaatttacccgggtccaagtcgttgtctaatcggatcctcctccttgctgcgcttgctgagggaacgaccattgttgacaacttactcaacagtgatgatgttcattacatgcttggagctttaagaactctagggctaaacgttgaggaggatgttgcaattaaaagggcaattgtggaaggttgtggcggtgtgtttcctgtgggtaaagaagctaaagatgacatacagctttttcttgggaatgcaggaactgctatgcgtccattgactgccgcagttactgctgctggtggtaattcaagctacatactagatggcgttcctcgtatgagagagagaccaataggtgatttggtcacgggtcttaagcagcttggggcagatgttgactgttctctcgggacgaactgccctcccgtgcgtgtagttggtggaggtggtctccctggaggaaaggttaagttgtcgggatctattagtagtcaataccttactgctctgcttatggcttctccccttgcccttggggacgtggaaattgaaatcatagataaactaatttccataccatatgtcgagatgacactgaaattaatggaacggttcggcgtctcggtagaacatagtgatagttgggaccagttctttattcgaggcggccaaaagtacaagtcacctggaaatgcttatgtagaaggtgatgcgtcaagtgcgagttacttcttggctggtgctgccataaccggaggcaccatcaccgttgaaggctgcggaacaagtagtctgcagggtgatgtgaagtttgcggaggtacttggacaaatgggtgcggaagtaacatggactgagaactcagtcacagttaagggcccaccaagggattcttctggaaggaaacatttacgtgctgttgatgtgaacatgaacaagatgcctgatgttgccatgactcttgctgtggtcgctctttatgctgatggccctacagccattagagatgttgctagctggagagttaaagaaaccgaaaggatgattgccatttgcacagaacttagaaagttgggagcaacagttgaagaaggtccggactattgtgtgatcactccgccagagaagttaaacgtgacagcaatagacacatatgatgatcacaggatggccatggctttctctcttgccgcttgtgcagatgttcctgtgaccattaaggatccttcttgcacacgtaagacgtttcctgattactttgaagttcttcaaagatttgccaagcattaatgtgattatgggtagtggtttgcttttctatatgtaatttttgtttcatttgtaacgagtaaaatgtgagttttgggcataacatattcttatgaacttgtattctttcgtaagatttttttagtgtaataaaatattttgctatttc

SEQ ID NO: 65 - DNA, 1800 bp, Conyza canadensis
gattcaaatcccacatttactacgtgttttctcaaccaaaatcccccccgcccccccacaaaacacacaatggcagttcacatcaacaactccaacatacccattttcaacacttccaatctcacaacccaaaacccatcttcaaagtcatcatcttttttatcttttggatccaacttcaaaaacccattaaaaaacaataataacaataattatacctctgtttcttgtaatgtgaaaaacaacaaaaacccatttaaagtatcagctttctctgccacttccaccaaagagaagccatctaaagctccagaagaaattgtgttgaaacccattcaagaaatttcgggtacggtccatttacccggatccaagtctttatctaatcggatcctcctccttgctgccctgtctgaggggactactgttgtagacaacttgttaaacagtgatgatgttcattacatgcttggagctttaagagctctagggttaaatgttgaagaaaatagtgcaattaaaagagcaatcgtagaaggttgtggtggtgtatttcccgtgggtaaagaagccaaggatgaaatccagctttttcttggaaatgcaggaacagctatgcgtccattgactgctgccgttactgctgccggtggaaactcaagctacatactagatggtgttcctcgaatgagggagaggccaattggtgatctggtcaccggtctaaaacaacttggtgcaaatgttgattgttctctcggtacaaactgcccaccagttcgtgtagttggaagtggaggccttcctggtggaaaggtgaaattgtcaggatctataagtagccaatacttgacttctttgctcatggcagctccccttgcactgggagacgtagagatagaaattatagataaattgatctctgtgccatatgtacggatgacactgaagttgatgcaacggtttggggtttcagtagaacacagtgatactttggacagattccatgtccgaggcggtcaaaagtacaagtcacctggaaatgcttatgtggaaggtgatgcttcaagtgcgagttacttcttagctggtgctgccatcactggcggaactgtcaccgtggaaggttgcgggacaagcagtttacagggtgatgtaaaatttgctgaggtccttggacaaatgggtgctgaagtaacctggacagagaactctgtcacggtgaagggtccgccaaggaattcttccggaaggggacacttgcgtccagtagatgtgaacatgaacaaaatgccagatgttgcgatgactcttgctgtggttgccctttatgctgatggtccccactgccattagagacgtggctagctggagagtaaaagaaacggaaaggatgattgccatctgcacagaactaagaaagttgggagcaacagtcgaagaaggtccagattattgtgtgatcactccaccagagaaattgaatgtgacagcaatcgacacatacgatgatcacagaatggccatggctttctcgcttgccgcctgtgcagaggttcctgtcaccattaaggacccgggttgcacccgtaagaccttccccgactactttgaagttcttgaaagatacactaagcattaaatcacatataagatgttcagaaagaaaggggttagaggttttaaaatgacacctttacccttcagtccttcaccattatctttcttcagaaatgtttcacttacagagttacatcatatgtatatgggcgacctgagcgtattttatcttttcttttc

SEQ ID NO: 66 - DNA, 1730 bp, Conyza canadensis
atggcagttcacatcaacaactccaacatacccattttcaacacttccaatctcacaacccaaaacccatcttcaaagtcatcatcttttttatcttttgggtccaacttcaaaaacccattaagaaacaataataacaataattatacctctgtttcttgtaatgtgaaaaacaacaaaaacccatttaaagtatcagctttctctgccacttccaccaaagagaagccatctaaagctccagaagaaattgtgttgaaacccattcaagaaatttcgggtacggtccatttacccggatccaagtctttgtctaatcggatcctccttcttgctgccctgtctgaggggactactgttgtagacaacttgttaaacagtgatgatgttcattacatgcttggagctttaagagctctagggttaaatgttgaagaaaatagtgcaattaaaagagcaatcgtagaaggttgtggtggtgtatttcccgtgggtaaagaagccaaggatgaaatccagctttttcttggaaatgcaggaacagctatgcgtccattgactgctgccgttactgctgccggtggaaactcaagctacatactagatggtgttcctcgaatgagggagaggccaattggtgatctggtcaccggtctaaaacagcttggtgcaaatgttgattgttctctcggtacaaactgcccaccggttcgtgtagttggaagtggaggccttcctggtggaaaggtgaaattgtcaggatctataagtagccaatacttgacttctttgcttatggcggctccccttgcactgggagacgtagagatagaaattatagataaattgatctctgtgccatatgtacggatgacactgaagttgatgcaacggtttggggtttcagtagaacacagtgatactttggacagattccatgtccgaggcggtcaaaagtacaagtcacctggaaatgcttatgtggaaggtgatgcttcaagtgcgagttacttcttagctggtgctgccatcactggcggaactgtcaccgtggaaggttgcgggacaagcagtttacagggtgatgtaaaatttgctgaggtccttggacaaatgggtgctgaagtaacctggacagagaactctgtcacggtgaagggtccgccaaggaattcttccggaaggggacacttgcgtccagtagatgtgaacatgaacaaaatgccggatgttgcgatgactcttgctgtggttgccctttatgctgatggccccactgccattagagacgtggctagctggagagtaaaagaaacggaaaggatgattgccatctgcacagaactaagaaagttgggagcaacagtcgaagaaggtccagattattgtgtgatcactccaccagagaaattgaatgtgacagcaatcgacacatacgatgatcacagaatggccatggctttctcgcttgccgcctgtgcagaggttcctgtcaccattaaggacccgggttgcacccgtaagaccttccccgactactttgaagttcttgaaagatacactaagcattaaatcacatataagatgttcagaaagaaaggggttagaggttttaaaatgacacctttacccttcagtccttcaccattatctttcttcagaaatgtttcacttacagagttacatcatatgtatatgggcgacctgagcgtattttatcttttcttttc

SEQ ID NO: 67 - DNA, 7954 bp, Conyza canadensis
gtgttttctcaaccaaaatcccccccgcccccccacaaaacacacaatggcagttcacatcaacaactccaacatacccattttcaacacttccaatctcacaacccaaaacccatcttcaaagtcatcatcttttttatcttttggatccaacttcaaaaacccattaaaaaacaataataacaataattatacctctgtttcttgtaatgtgaaaaacaacaaaaacccatttaaagtatcagctttctctgccacttccaccaaagagaagccatctaaagctccagaagaaattgtgttgaaacccattcaagaaatttcgggtacggtccatttacccggatccaagtctttgtctaatcggatcctccttcttgctgccctgtctgaggtatcttttataaattatgttttgaatatttgaatttaattagtgttttgattgattgactagaatttgattattattaagatataggaaaagatatgtacattagtttttgactgaatgtgaaaaatgtcttaatgtagtaactcacaaagttttgtttgtgatctataagtttactttataaggttactctatgggaaaaggttacgtagattttggttttctttgacctctgtagttggtatggccatgagaagaagtaggcctaaaaagagctttgcttgtgagaggacatgaccatacttagaggactaggattagtttagaggaatatggtagatcagtaatccttttaggtattttaggggtagtctatatacttatatgtaggaaggtcaggcatgatacctttcttatatgctcgtatactcgtaattgttgctctcagtccatttgcttggttttatgcaaacggttatgtttattatgtttttatactgatgtctaatatgttcaaatgtcctatctactatgtattgtccattttgcgctaaagtgtcctacgtggtatgtttgctactcccctttactcttaacgtaggcagctcatacccgaccgacaagtatggtttgcttaactctttacactctcctacttttgcatcatatggccggaggtccttatggaagcagtctctctacctttgggtagaggcaagattgtctacatctcacctcccccataccctgctcactgtgttgtttagtttatttaaaggtggaaaggaaaggagatgagaggagaaatatataagatgcattcttaagatttttttaagtgtggaaagggaaggagtagaaaggattagagggggaagttgatatggatctgcgggaagtttatattatttagtaatataatattaattttattattattatgattaggaaagtattgtctttacttagatatcttatgatrtcttttatattatttagttagcttgatcatcaagctataggattagtataaaaagaatattagggttgtaattctaaagtatgaaatattaatcagaagtttattgttcttgtttaatcaatttaggagtttactggttctcgaataccagcctatctttgttattgttcttatcatttgatacaagccattggttcgtatcaattggtatcagagcatcgatcttgcaacctgtgcttttcttcaactatggaatcaaggacgatcattgatgttgatgctgatgtacagcaataccgtgaatctactgaggcttgggtggacataatgcatgctcggatcaatcgttttcaagcagccaccgcgcgatctcagttggccactcaacaatttcacttgaggtttacaactaggctggataaacttgaaccagttgtagttgggacacagcagaagttggatgcattggcggcagtggcaaaccagcctctaccccagcaaccgatgattcaggaagttgtcataccaacagtccctacaacttcaccaaaaacaaatcagtttgggttgaagcaatcgaaggtttcacaagcagggtatccttatcccagacaccttcagatcttgcaaggaataatcatcctgatgtgaaccaagaacgaggagctggactaacattcaaggacataagcaatgcttatgaagatctggcaggcgatgaaaagcgatccatatatgacatgaatggggagaatgggcttaaaggtacatgttttggtttaaggaattgtgcaaaagctgatgaactttctggtttgatacatatgattgagtttgttaaacaacttcgatatgatcagcaagctatggagtttcaagtcagaatttgggatcctggaattactcgaaggaacaatttaaagcaacaccttgaggacaaggtgtttttggggtgggagtaatgatatggatctgctggaagtttatattatttagtattataatattaattttattattaatatgattaggaaagtattgtctttacttagatatcttatgatgtcttttatattatttagttagcttgatcatctagctataggattagtataaaaagaatattagggttgtaattctaaagtatgaaatattaatcagaagtttattgttcttgtttaatcaatttaggagtttactggttctcgaataccagcctatctttgttattgtttgatacaagccattggttcgtatcagaagtttagttgttttttgtctcaaaagttttcccctcatttttgaggtgattaggaaggaaaacttctcttccctctcatctcctttcctcccttaagttaactagacattaatgaatattgggtcattttgttgttgtggctataaggaatgacttgacttaaaaacttatagaaatgctgtgttatccagtaagtaatcgtttttttactatttgtcttttaagaccattcattaagcacataaaacaaacaacaatcctgcttaatcgatgtagactacatacatgtagacggacattttatccataaacagctaattagtcatacatagccagttatatgttttacatcgtgcagtgtaaaacttctgcctttactgctaagattttttgtttacatatatattagatatattaaggtttgtattttgatgctaacatttaacattactttttttttttatcggggagtgggttaaagtggttcttctacctggttttagttttttagatgtatatccaatatttattgtgggtaatttaaagttttgaaatttttgtttttttttgtgaacagtataaagtttctgacttttttgattttttgtgaggtaaagtcgtgaatgtgtaatttggtatttgattgatattcttgatattggtacatagtgaggtgcaaggtgctgatggtttcttagacgggtcatgtttgttttgtgtaaaatacatctgtttttttctttgataacaagttatagaagttgcacccaaaaatgttcttgttaaagcgataaaaatttggatagaaggtgacggttaatgattcgatatattgatttgagtttccttttatctattgcattttcacaagttcaacattccaccctcgattttttgatgaatctatgactgaagaaaagggcgattgttgcctttggcaatcagttttggattttattttgtcatggaaagggggtgttagttcctgaaccttagtagaagatgataagctatagtttcaatattgcttttctttcttgcatctgaactggttttgcatttttcaaaggactataaaagatgctatttatcacctatgacctatgttataaatagtaaggtattaaactattaatattggtatagtcttgagaaatccatgaatttcgattgagttcataggacacatctaacttatgtttctttacattacgatttacacatcttgtctttgacgtctgattttaaaatagcgtttctattgacattatgcatttctttgagttctctatataaatttttgtaagctttccatatgtatatactatgaatctgagtgaacttatgctatcaggggactactgttgtagacaacttgttaaacagtgatgatgttcattacatgcttggagctttaagagctctagggttaaatgttgaagaaaatagtgcaattaaaagagcaatcgtagaaggttgtggtggtgtatttcccgtgggtaaagaagccaaggatgaaatccagctttttcttggaaatgcaggaacagctatgcgtccattgactgctgccgttactgctgccggtggaaactcaaggtattttaacttagtgttatattctcctgcattttatgtctgcttcatcctcctacacatacatttcatgacatgtgtacccatttctctcacctcatcatttcatttttctatgtgtcacaattatatgagtaggaggattcatactttcataggcataaattgtaggaatcaaatatcgtttctttttaacctaacatctcttgattagctattataatccgtagaacgtatattaaagttttttgtgccgatatgtaattttaaggtgaatacacaaataaaaattttacctttctgtttgttgcatgttctgtacatataaatttttagtttttgttatatatctaagaatctaagatctctaaatattcttctattagttgacacaaattaagggatcacatgaactgaaaactcaatagcatccacttgttgataatgctgcaatttaatgcccaaagaagaaattattgcaattcttattatcattttatttatgggagacagtgagtatgaatttgggaatcgataatagagttgaccaacttggtggtgctgggtagctaaggtagtgggtaagttacattgatatgtaataccctaacagttatgagttttttcttcagctacatactagatggtgttcctcgaatgagggagaggccaattggtgatctggtcaccggtctaaaacagcttggtgcaaatgttgattgttctctcggtacaaactgcccaccggttcgtgtagttggaagtggaggccttcctggtggaaaggtaatcaacaataagattgctgcattttaaagtcgtaagaattaattatttggttccatatatgattggaaaatttggttatttaagaaactattaattagtaatgaaattatagtttttgaatctttttgtaatcttctttccctggccttcttattgcaggtgaaattgtcaggatctataagtagccaatacttgacttctttgcttatggcggctcctcttgcactgggagacgtagagatagaaattgtagataaattgatctctgtaccatatgtggagatgacacttaagttgatggagcggtttggggtttcagtagaacacagtgatacttgggacagattccatgtccgaggcggtcaaaagtacaagtaagttgatcatttcataaaagtcaatytttacgtgaagatcggtcaacatctattttaatccgataaaatctctttaggtcacctggaaatgcttatgtggaaggtgatgcttcaagtgcgagttacttcttagctggtgctgccatcactggcggaactgtcaccgtggaaggttgcgggacaagcagtttacaggtattatccatgtgcccacctcaaagatattcaaaaactaaattgtttctcaagtatatattcttctagttaattgcaaatttttttgccccatacgtctacccattctataaatttcgtccaaagttggtgactcggttcaatcgtgtaataagtctcttttttgttttttagaattgacaatttatgtcagttcttggttatatcaacgatgtggggagtgtattgtgcacacattctaaaagaaggacatttagtctttttgctttctttttgcctcaagatcatcttcatcttttcaagatactctgcactcatttgcattatcaaagttttggatgcattctgtaactgtggtacaaggagggagacataatatgtcattagttcttattcttaagctcaatgcacactatcacctcttacttcttttttctttctttttttttattagtttatttaagctcaatgcacactaacacttcttctttataacttcaagtcattcattttaatttttgaagctgatggtttttgacattaaagatagaactatgtatatacatatgtcatttcatcttacctatttgcatgtcttgttgatctttaatcagggtgatgtaaaatttgctgaggtccttggacaaatgggcgctgaagtaacctggacagagaactctgtcacggtgaagggtccgccaaggaattcttccggaaggggacacttgcgtccagtagatgtgaacatgaacaaaatgccggatgttgcgatgactcttgctgtggttgccctttatgctgatggccccactgccattagagacggtatgtgttagaattcaccacagctttgtaatgttaaatatatgttagtttagattaacaaaatgactatatgatcacaaaaggaaacatttatctcaaatttggaactaatatagtatcatacctatatagcaattgtagtttcaaagaaatccttaaggtcgtgttgtttattatacatgactgggtatatattgttttttgtgctcaagcttttaaaaatcacatttgactatcctttattgaaaggttaattttgttcatgtctcattttaggcaatttactttttatcaaggaaaaaatagcaatcaatgtctatggtcgtagtttaggcaattaaaacccatcaatcaaagtgctgttggttcaaggcatatttagagataaatggagataatagtacgtggatgtcttttcaaaagaagtacaaactttttcttgggctctttagtttttactgaaaataccaaactcctttaactgaattgtctaaaatagaagaaactggaaattagttgctattttgtgaaaacgaaaagtaaatcgccaaaaattggaggttaagtatgcttatattttatgtaattcatctttttgaaaaatgtaagaacttaaatggaagtgaattgatttgaaaaatatatattaaagcaccacttatgaagaaatctagaaattgagttttaggatctgtaaagacatcctgtatattgtatgagaatagatatatcgtacaccacaatccatcatttttacttttcacacgacaaagtgaatatgaaaaaatgtgagttaaaacacttaaaaggcagttttgggtgtgcaaagtaaaatgtagcacaaattggcccctttctcatattgggtttacatattcttctttacgtatatccctatattgttcattttgtgggccccatctcacgtcggtaaatcattagatggactaaatcatattcttcattccttatattgggcagtggctagctggagagtaaaagaaacggaaaggatgattgccatctgcacagaactaagaaaggtacaagtcattaacccatcttactctaaaaaatagaatggccatgagtacttttaaagtactcaatgaatctgcccattatttgtttagtgctaataggcccttttgcccttggaacttttcagttgggagcaacagtcgaagaaggtccagattattgtgtgatcactccaccagagaaattgaatgtgacagcaatcgacacatacgatgatcacagaatggccatggctttctcgcttgccgcctgtgcagaggttcctgtcaccattaaggacccgggttgcacccgtaagaccttccccgactactttgaagttcttgaaagatacactaagcattaaatcacatataagatgttcagaaagaaaggggttagaggttttaaaatgacacctttacccttcagtccttcaccattatctttcttcagaaatgtttcacttacagagttacatcatatgtatatgggcgacctgagcgtattttatc

SEQ ID NO: 68 - DNA, 6988 bp, Conyza canadensis
ggctggtgtcatggcttaataactgtratgacattttggtgatgcgtaagacctgtaagcaccagcacaagtctaagtcttgaatcttatacaaatasgtttttttctattttccaaatttattgagttttctcrtgagttcatgtatgagcattattgcatagtgaaaatatggtcagatggtttcatcgatgacaagctaatttttaagaaagatatattacttttctttttaacttcgggaaaatcataaaagtgaaatcatcgttttaactttttacgagcatggtactcgcgtaatgcagcggcggtggtatagaagacggtctaatggtggcagtgtcaagtggtgtaggtctatgtgcaccgaaactccaaactgacatagccgtacccatttccgaaactccatggaaacgttttctcttacgaaacacgtatgaaacattccctaaaattttctatagattaaacgtttctttgaagtttccatacggtttctaattaatatcaaggttttaaaggactttttcgaatccccaaacccaaacatgttatattatatacaatttgatcaacattaaattttttatattacaaagccattattaaacactaaacattcaatgagtgatcactaatcaaacatgtattataaagttctacatatataattatacataatctctcaagtctcaaatctcctttatgaaaaaattgatataatttatatttgtatattttttttattgttgtacccgtatcctggattttttagttttactgttccccgttcccgtattgttcccgtacccttttcccgtacctgtttcggtgctacataggtgtaggttgatgtaattgtgatagtgaaaagttttagaagataagagtttaaagtgttaagtattaaaataagggtttatggtgtaaattaattcattaaggggaaaatttataaaactatttctatagtgggtttttattaagagacaatttagtaattttatatgtgacatatgagtaactatttttattttgagaggggtgcataatttttattcgaagagtacggataaaagtcaataaattacgagcagtgaagtatcccagacaccccttgcaaggtaattttttaaaattttattcatggaggtttggtaggaagtggtggtggtggtggttggtatgaaattttgtttttgaccttcttcaaacatccacctactactgacccctcccttcaaacccaacccaaaatccaaatcattaaatccttcaaacccactgtgtgttttgtgtgaaatttcacacacaacaaacaatggcagctactcacattaacaccaccaacattgcccacaatctccaagctaccaccagtctttccaaaacccaaaccccatcaataaagtcacaaccttttttatcttttgggccaaaacacaaaaacccgattgcccatttctctgtttcttctaataataatagaaatcttggaaaaaaatgtttaatagtttctgccgttgccaccaccgagaaaccgtcaacggtgccggaaattgtgttacaacccattaaagaaatctcgggtacggttaatttacccgggtccaagtcgttgtctaatcggatcctcctccttgctgcgcttgctgaggtatagtttaatttggtaataatgtttgacctttaaaatttgacatttgggctacatgattgatatgggtcttgaatgaattgtgttataaaatttgggaagttaaatgttaataatagtttaatcctttagaaattatgaagtaatggttttagaccctgaatttttttttattgcataggttagtcccttagctagttagcttttggttgacatcttagaaaaaccagtacagtttttatattttagtccttaagcttcaattttttgcaatgtattgccatttgaaatgatctagtaaaatgttcaaaatcaatgaattggcggtttaaagatataatgcttggatcaattgttatgtaaagtgtgctaggcggtcaaaagcgaatcttggatcaaggaagtcgtagaatactattgatttcatattattgatttcttattatgcatatttgacatgtgcttctaacatcatggcatttgggatttatttctatatataaagcatgactgtatggttataaagttcaaaacttgtatggtataaatatactcttcttacttcttagcaggaatgtgttgacttataagctgaaaacttttataactccaattgtgtgtagtaatacttgaaagtggctgagttcctaggacagtattacatgcgaacactacaacgtgttactaaatttgagataggtatgatttggttttgttggatacaaagtctaggtcagttaacatagccagttgaggacgatagctttcttgtcttatttcctttttatagagggtttgtgtttcgtgatggtaatattgagtaccaccatatagttcacaagtcatataataaaatcagagcaacattcgaggagtcgcctatatgcatattattgcaccatgctaaaatccaagggcatattttgatgccaatttgtaatttatttctcagggaacgaccattgttgacaacttactcaacagtgatgatgttcattacatgcttggagctttaagaactctagggctaaacgttgaggaggatgttgcaattaaaagggcaattgtggaaggttgtggcggtgtgtttcctgtgggtaaagaagctaaagatgacatacagctttttcttgggaatgcaggaactgctatgcgtccattgactgccgcagttactgctgctggtggtaattcaaggtatttggacgttgtcattgactcattgctatagtaaatatatgttgacttgtgcacacaagatttgaagcatcttttaaacatatatgattagatacagagaacactgcatgttgaaaacttgaaatacaggactttcttaaaatattgggatttcacatatatgggttgaatagttgaaatttcctccttctacctttaaccaattgtatattacttatttaaagttgtgttttaaacatggcgatatgattagatacagagaacactacttattgaaaggtttatgtggtatagtatgaattttaacctcaaaaagggtatctcactatctcttcatatagaagcacacatctgattctgttatatctttatggatcattttttccagctacatactagatggcgttcctcgtatgagagagagaccaataggtgatttggtcacgggtcttaagcagcttggggcagatgttgactgttctctcgggacgaactgccctcccgtgcgtgtagttggtggaggtggtctccctggaggaaaggtattgtgttttcattagtagttgttttctatgcaaatagcaacacaccttatatatcatccatttatagctatttttctaattggggcgtacgttactgtaatttgatcgtccaaccagttgtcatgaccctccttagctaaaatggatgaaagctggtccgacaattgaccataataaatgggtgtgggctatcttgctaaatttaagtatttcacttaaaatgagagttggtttacagtgtgcattcaacctaatttttttttttaacgtcgcatacaacctaaaattgaataatgttgtagacacaaaagctcttagtgagctttaatagtaacattagaggtggtgatatcaatcaaacaataagggaaaagtaatatgtataaaaattagaattaaacaagaagttttaaaaaatagatcaaatggtttgaaagtcttctaaagtgtaatttaatgcataaatcttcctaaattattttatttaaaaactgtattgtaatataattttcatcatcatatttgacattctatgaaaacaaatatacattttgaacaaacagtgttacggatcgacccaggcaattcaaagctgtccattctaacctaaaccagttttcacggttacctctattttcctgcctttcaatttgccagctacaagaagcttcattccaccataacgggttcacgctaaagatgcaaagagtcatgattcgttatttattatcttgacttattatgataacaatagttttggtgtattttgatgtcttcaggttaagttgtcgggatctattagtagtcaataccttactgctctgcttatggcttctccccttgcccttggggacgtggaaattgaaatcatagataaactaatttccataccatatgtcgagatgacactgaaattaatggaacggttcggcgtctcggtagaacatagtgatagttgggaccagttctttattcgaggcggccaaaagtacaagtaagtctatttctttctttttaaagtaaaactggaatttaaaaaggttgcagtttctaccctatctcttgtaatgggttgattcaggttatgtataatctctaatgggtcaaagggggtaaaatacaaaaaggttattttgtcaccaaaacgatatgatgcatattacctagttttcttattggaatagtaaacatttttaatcatttcaatgtacaactcttttatgtgtccacagaaattaaacatagcccctaggactatgttcatcatttccctttataaactagttggagaaaagtattttggccaacccattccgaatttacacattttggcctatcacccagcccgtctgtccactcattttcagggttttgtatggagacccgtttgttaattagttggattaattatcttcaggtcacctggaaatgcttatgtagaaggtgatgcgtcaagtgcgagttacttcttggctggtgctgccataaccggaggcaccatcaccgttgaaggctgcggaacaagtagtctgcaggtgcactttgacctcctttgttttttattcttctcgatttcaatcaaacggctttacggttttacattttaaatggattttgtggaaacaacgagtattaaaagttcatcaaaagattttattattatttttatgcaacaattatcagcatctgtagtgaaatattcagaagtccgtttttagttcaaagtttttctttttaaccttaaagtcaaaagtgagatggcaaatcttttacgtaaaatgattcaattgaggctgtactttggtcgattctgacttaattgggaacataggttacgttagctataagcctataactataagtaagcatgtgtttatatgtcacaatgacttgattaaaagtaaccttatgattttcttagtatacgttagtaatctaacagtatcataataacggacaaaaatgtgctggtggatcagcccacccagcccgttagaacatgacataaaaatgacccaacttgacctatcacctaagctcattataatatgttatccaacccaccctatcttggccacctgtgacctgtattcaaatgtatactgtaaagcaacttcctgtttttcttaaaacatgtattctgttttttctttccaatgaaagggtgatgtgaagtttgcggaggtacttggacaaatgggtgcggaagtaacatggactgagaactcagtcacagttaagggcccaccaagggattcttctggaaggaaacatttacgtgctgttgatgtgaacatgaacaagatgcctgatgttgccatgactcttgctgtggtcgctctttatgctgatggccctacagccattagagatggtatccttccttttaatgtggaaaaaagttcaacatgttttcactaagttttcaaagtaaatagatagatatgacttcaaaataactctattgccatgttaaatcttacacatattgcaagcacattctagtggtggtttggaatggcattatgaaattgaatatctaaaatatttaatttaaacatgttcggtttctgatcatttagggtcagttttaactgaatctcagagaagtcgcgcaagacatgtcacatatttgtttctccgagtctcagacaactgctttttcaaaatgaaagcattctagaactattttgcttacagttgattttctaattctgggtgtacataaatcaagataattacttttataaaacacattcaaaaagcctcctagatgcccctattatgaattttctgtttgctatacgagtatctgctttgtttttgaaaatggtttttttgttttttgccagttgctagctggagagttaaagaaaccgaaaggatgattgccatttgcacagaacttagaaaggtaaaatgatactttgttactctgtgatctatgatactgctattgcttagaggtcactaaagtggtaaggtcaaataggatgggtttgaatgggaacacttttcgcccaaaacatatttaactaatataatttcacttgttactatctaatttcataaatgaaatgatttagaattagaatgttttgggtgtcttgcaacctattcattttaagctattttaattgtcttttgacccattagaaatatacataagaaatatacttaatcagtcctctattgttaatgtttatctggggtgaaatttcttcagttgggagcaacagttgaagaaggtccggactattgtgtgatcactccgccagagaagttaaacgtgacagcaatagacacatatgatgatcacaggatggccatggctttctctcttgccgcttgtgcagatgttcctgtgaccattaaggatccttcttgcacacgtaagacgtttcctgattactttgaagttcttcaaagatttgccaagcattaatgtgattatgggtagtggtttgcttttctatatgtaatttttgtttcatttgtaacgagtaaaatgtgagttttgggcataacatattcttatgaacttgtattctttcgtaagatttttttagtgtaataaaatata

SEQ ID NO: 69 - DNA, 1563 bp, Euphorbia heterophylla
atggcacaagttagcaaattctgcaatggagttcaaaaaacctccattttccccaattttcctaaaccggaaacccccaaatcggtgccttcgttttcaattaggtcaagttttaacgggtctccgatttcatcgggtctaaatcggcgccgaacaaagggcgattgtattgttgttaaaggtaaagctagttcgtttaaagtttcagcttcagtagccacaacagagaaaccctctacttcaccggagatcgtgctgcaaccaattaaagaaatctccggcactgtcactttgccgggttctaagtcgctgtccaatcggattcttctcctcgctgctttatctgagggcacaactgttgtggacaacttgctaaacagcgatgatgttcattacatgcttggcgcacttaaaacattaggattacgagtagaagacaatagtgaactcaaacaagctattgtggaaggttgtggcggtcaattcccagtgggtaaagagtcaaagaaagacattcaactttttctcggaaatgcaggaactgcaatgcgtcctttgactgctgcagttactgcagccggtggaaattctagctacatacttgatggagttccaagaatgagggagagaccaattggagatttggtaaccggtttgaagcagcttggtgctgatgtcacttgctcttccacaaattgccccccggttcatgtcaatgcaaatggcggcctacctgggggaaaagttaagctttcaggatcaataagtagccaatacttgactgctttgctcatggcagctcctttggctctgggagatgtagaaatcgagattatcgataaactgatttcgattccttacgttgagatgactttaaagctaatggaacgctacggtgtttctgtacaacacagtaatagctgggatcgtttcttcatcccaggaggtcaaaagtacaagtcgcctggaaattcttatgttgaaggagatgcctcgagtgccagctactttctagccggagcagcaattaccggtggaactatcactgttgaaggttgtgggactagcagtttgcagggagatgtgaaattcgccgaggttttggagaagatgggagctagagttacctggacggagaacagtgtaactgtgactggaccaccacgcgattctcctcgtcaaaaacacttgcgtgctatcgatgtgaatatgaacaaaatgccagatgttgctatgacattagctgtggttgcacttttcgctgatggtcccactgccatcagagatgtggcaagttggagagtgaaagaaaccgaaaggatgattgctgtttgcacagaactcaggaagttaggagcaacagtagaggaaggagcagattactgtgtgataactccgccggaaaaactaaatataacggagattgacacttacgatgatcaccgaatggcgatggccttctctcttgctgcctgtggggatgttccggtcactattaaagatcccggttgtactcgaaaaactttccctgactactttcaagtcctccaaagctttaccaag

SEQ ID NO: 70 - DNA, 9336 bp, Euphorbia heterophylla
attaattacttcaaaataagaaaacaactgacttcagtaattattttttcttaacttctattttcgtttttagatagtatagtcaagcaacacaaattagttcttcgagatagtgtcattgattgattttgggtctaaactttagttccttctaaagcccaagcccaagctcaagcttggttatgggaaattttacatccaagttcactttttatttttttttcctacctggttcatcggagctttactccgactacatccagatctgacccgggtcgcgcacctggctatgatgggtgagtctcccaataaggattttttgcgttcaccaggactcgaactcgagaccttgcttaagcaataccaagtcgcttaccacttggaccaaattcactttaactcgagataaataaaaaattcacattgactcattaatacactattttttttaaccaattagtctttaagcttctccagatttattaaataattaaaacaataatcaatatgaatgttttttttatcacgtgtaaaacataatataaaatggacttggaagacgtgtagcctatatcattttataaaaaaaattatgtatacacttattaagttgtatgaatatttttaaatagtaaacacttagcaattgatatctctagttataaaggttgtcgatttcccacctgataacatgattgacaaaaatgtttggtctaatgaactttgatactataataaattggtgaatattaggactttattttttataaggtaatagttactttatttttcattattgttggattagtgatgtggatttcaaaacaatggtagactagatgtagtaaattacaaacaaagttatcataaaatttttaattgtatttattatatttatattatataatctcacaaaatataattataaaagtagatatgcttatatatctataataagcaccaaacctacccactttccctccctcaccaaacatgccgttaatggaccaaaatgctgatttggcaaaatctaattggtaagttgctaatcacataataacaaaattgactctatatcttcaaaaccttggctatctaccacgtcccactaccatacgccacttctcaatcttaccaacccctttttctttttggccccataatattcttaacatttcaatttagcccacaaacttttagagcaagtcaagtcatttttttaaatttcattcgtcaaactccattttgaggaatttccattactttcattttaactatcattctcatttttcatattaaattatcaaaaaataataatattttattattatattaatttatgtagatcatttatgttatgttgtaatgaactaataaaataattaaaaacattaaaattcaaacaaagtaataaaataatgattccttgaaatagagaatgcccatatacgagaaaccctcgttttgaagaataccgtatggagaatggttggacttaggtcatttttatttagattaatactcaatgtagttcaatttagtaaccaataagaattggtacaagtggtaagcgacttagtatcgcttaggcaaggtctcgagttcgagtcttggtgtacgcaaaaaagtccttactgggagactcacccaccataactaggtgcgcgacccgggtcggatctggatgtagttggagcaaagctccggtgaaccagatgaaattaaaaaaaaatgtaatccaattcagtttaaaaaaacaaaacttttagttaatatttgttattgtaattgaaaatcaaataatgttgtgggtcaaatttggaaaattgtgaaagatgagttagttggaagaatgaaacacctcaattgtcgttacaataacgcctaaaacctcaccaatctcaaatccagagcagccatttttcttcttccccgtcgagaccagcaagaatcagagatacacggagattggtggagggggatcctgtagctctagttaaatggcacaagttagcaaattctgcaatggagttcaaaaaacctccattttccccaattttcctaaaccggaaacccccaaatcggtgccttcgttttcaattaggtcaagttttaacgggtctccgatttcatcgggtctaaatcggcgccgaacaaagggcgattgtattgttgttaaaggtaaagctagttcgtttaaagtttcagcttcagtagccacaacagagaaaccctctacttcaccggagatcgtgctgcaaccaattaaagaaatctccggcactgtcactttgccgggttctaagtcgctgtccaatcggattcttctcctcgctgctttatctgaggtatgaattgttctggatttttcggcgattgcattctgtgccgttgaattgtaagctgcggttttagtataatcataattagatgaagcagaaaggaacttagttcttttgcattttatgttcagattcacatagatcactaactgttggggaaatcaggcaatgaaggctagataaatatgaagttatatcgaacactttgattgaaacttatttagctttctaccaaataatttattcggataaaatcagaaatcgacaagaacttagaacgaatgttgttgtgatgttatgaaacaaaaaagtctgtaaaacgttatatttgccaatgcgttctctctctatatatatagagaaccgaaataaccgtcatatgttaactgtttttgtagttattttcgtctaagtcgcgacatggtccaaatccaaaattcacgaattttccaagggaacttttgttggaaataaaatttgcttccgaaacaccgagctgtcggcctggggcgctgccccaggaccccgctaggggctgccgccccttaggactccgcactcgggggcgatgcccccggaccccctaaatcgtaaacagtacccgaacaagtgtgcactccgcacttttccaaacttgtttcggtgagacgttacaattacattggacaaacttagttaatccaattacactaaaataataacaacttttactttagctcgaccccagtttggggcactacccccaaaatccgaatattgaacttgaacaaagcatgcactccacactctcttgacttgttcaatgaaatatcacaatcgcacaattagttgatctaattacattaaaatactactaacaacacttaatcaacagtctatcatgttgttggtttttctttgaacttctgaagcaggatagataaagatcgttccttcccactgattgatactatcattgcattgacctttaaattatcttcttttggtgcatatagattacagatttagttaaatcacgtaaagtttgggctgaatttttgttaaaataaacttcaaatttgaaatcttactaatttttcagtccctaggtttccatatcccctttatttctaaaagccgttgttttgttggcatgccttataattgatttttcgtttatttcttgcaataaacaactttaaactctggccttggaagcttttttacctgtgtaaagtagtgattctgagtgttctacattcaaaattttgcttctcgagaccataaaacggtgctttacatctattgtccagggcacaactgttgtggacaacttgctaaacagcgatgatgttcattacatgcttggcgcacttaaaacattaggattacgagtagaagacaatagtgaactcaaacaagctattgtggaaggttgtggcggtcaattcccagtgggtaaagagtcaaagaaagacattcaactttttctcggaaatgcaggaactgcaatgcgtcctttgactgctgcagttactgcagccggtggaaattctaggtttacttttccccctttttttaccctctttagacatgccttgatttattgaacaataagcacttattttccacgacttatgagattctatatggtttaacatgtatctaatgtgcttcagctacatacttgatggagttccaagaatgagggagagaccaattggagatttggtaaccggtttgaagcagcttggtgctgatgtcacttgctcttccacaaattgccccccggttcatgtcaatgcaaatggcggcctacctgggggaaaagtatgtatcgatttggctatctgtttgctattaatttccagaacttttcgtgaaaaatgtaacttttcagaaaagcaatcctaaattggccctatagtcttattagtaacggtatcacaatatgtttcttctcttttgaattgtacctaattttccgtgtcttcactttaaaggttaagctttcaggatcaataagtagccaatacttgactgctttgctcatggcagctcctttggctctgggagatgtagaaatcgagattatcgataaactgatttcgattccttacgttgagatgactttaaagctaatggaacgctacggtgtttctgtacaacacagtaatagctgggatcgtttcttcatcccaggaggtcaaaagtacaagtaagtattttttctagattcacaaattcagaaagctattgaaaaaacgaaagctgaattatcgatcgattaggtcgcctggaaattcttatgttgaaggagatgcctcgagtgccagctactttctagccggagcagcaattaccggtggaactatcactgttgaaggttgtgggactagcagtttgcaggtaaatcacggaactttttcgtattagacatttacattttcacatctgatgtaaattaatatgaaaatctagggagatgtgaaattcgccgaggttttggagaagatgggagctagagttacctggacggagaacagtgtaactgtgactggaccaccacgcgattctcctcgtcaaaaacacttgcgtgctatcgatgtgaatatgaacaaaatgccagatgttgctatgacattagctgtggttgcacttttcgctgatggtcccactgccatcagagatggtaatttacgtttcttttcatgaattatgcttcgtattcttcaaataattcgaaaaggcagcctaacatttccatggataatgccgaactgaattaccgaattttcgtaaaaaaatttaccgaactgaactgaatttcatctaataatcaaaattttcttaccaaaaatatttcggttatccgaacaaaactaaattaattaaaaaatgcaattgggtttttaataaaatggtttataaatgcaataaaaaaatattaatccatcatgttgcgaaccaaacatattagttatcttataataattcaaccatacatataaaacaaatcagaatactattttaagaaaccgaattatccgaaccaaactatgaattatccgaactaaaatccgaaatatacgaaccgaattacataattcagttcggaaattcggataaacccgaattatgcactgctttaaatttaacaatgatttggctgtaaaatctaatgactcaaatgttactcggatcctaaaatacgaattccctttttttcctctcgatcttttacaagtgatacagacatacaagggaaagacggatcatttccttagatttcgtatgtttaaaacttttagactatttttgtttctgtttgacaatttgttcgctactctttatttccagtggcaagttggagagtgaaagaaaccgaaaggatgattgctgtttgcacagaacttaggaaggttagtttctgataaataaatttcactgggtttgaatatagtgaaacaaaattcgtcggcttatcgattctaattataatattattgattgttggaatttcagttaggagcaacagttgaagaaggggaagattactgtgtgataactccacccgagaaactaaatataaccgagattgacacctatgatgatcacagaatggccatggctttctctcttgctgcctgtggagaagttccggtcactattaaggatcctggatgcacccgaaaaactttcccggactattttgaagttctccataggtatactaagcaatgaacaaaaaacccgaaaaacttgacaattgatactaaagagagaattgttgctgtaaccattgaattctgataatttattcaagtgagttgaaatttgttgatgtaccagactagctttttttctatctcaaatgttgggtgttattgtagacaatgtattctgaatgaattcgtttcgtaatcttcgagttaataagcaatgaaaggatgaatgttctatttaagcactgtttttttggctacgactcaatggagttcatttcagttcaactatgtgtacaccaaaatatgttctattcagttcaattcagaaaattgcaataaaaaagaacattgccttaattaatacggaatataggcaaaacccacattgagccccttgccaactaaactttcaaatgttctttagctcccaactcggcactattgaccttcgaggtccctcaagttgtggcacaaatgaatctccgagctccctcaagcttaaaattaggtatgtaagcttgagggagttaggtagttttaagcttgacgaaatttgaagggtcatttgtatcaaattgagggagctcggaaggtcatttgtgccaacttgaggggattgagagggtcaattgtgtcaagtttagggggttaggagtttcatccgaaagtttgggcaccttgagagttattttttatcattaatatttagtatattaattttaattgaccatgtaattgctaaaatctatatttttcgcccacgacctcgtaatttataaggccagcccagggtaaggtgtaaaagagttaatctaaaaatagaatcacattcttcgaaacccaatctcaatctaacattaaataatgaagcatgtaacatgttgcctttgtctatatgacataacattattgaggcatatcgccctcctcctatttatttttcttacactttctcacatggatgcctacctttggttgttggatgtgtcttttatatatttccttcataatttacacattacaatattacattacatatcaatcaatctcttctaatatagtactttaagttgagaatattctcaactaaatgtgaataaaacaacaaataattgggttctttccatgctcactttgttaaaaacaaaattatgattactttgcttcttatcaccatttgatcaatcaccccactacttattcaatagtgataaggacaaagttatagttacttaaagtaaccatagaatttccccaaataattgtatcaatagcgagactcaatagattaatgttgtatattatacaagtaaccattaaactaggtttagtggtgacgacttcctctaaaagtggagaaagaagctgggatcctgaattcgagcctcatatttctcaaaatttaaatgtttctactacttaaaaaaatattattacaagctatattagttgagtactctaatttgctatacataaggtctaaaaatattagatctaacattaatgtcgtatgcttgaagtatcaacactcactttatacattattcaatcacttgctgattattgaagatagagaagacactataagctattataaggaagaaaaaggaaaagggaaaagcaaataataaaaggaccaatcaaagacctagaaaaagctaaaaatagtgccaaaacattgtagtatagatgcaaataaaaataattttactgttctatcttctgttctaagtaaagaagtaagctatttatatttattaattgtttaatttcactttcaggatatcttgtaattgaattattaagaacataggcattgagtttaagcaatcaattatataattaatgaacaataattctttttaagtgtgataagtggcttatttagtgtagataaatggacagcaaatccttttcaaagtcacttgcttatgtatgaaaatcttatattgtacactatataatgaaacctaccactaaagaagtgacacacacatattttaacctttatatatttttctatgataattcaattataattccgactttcataaatatgaaaaatggtagtagtaatgacaaattgtcttaacttaaatgatcggaagctaaaattctaattaaggaaagttgaaaaccttaaatcaagaatcttggaaagcaaaaagtaaaataaaagtccaataataacccaatcccaaaatatatctcacacacttccaaggtgtgaaaataactaatggtcccaatactaaaattaagttagattttcactatataaagtatgtaatcctcaaagtaaggatttgattggccaaaattcatggtctctcataccaatctaatcaaatttaaagacatttttgacatttaatcaatcatattgcaaaaaaaaaaaaaaaactaaaccaatacacctcccattattgcaagtgtttttttaaaaaaaggtggcatttttccctcttcctaatactattaatgccttttgtttatcaatttagtgttactcctaaattaagtagttaacctaattaattacccacaatttcctattcctatctttcatagccccttctccacatcatttgctaaacaaaagaaaaaaaaaacctgtcagcttttatatttttatatgaactagtgtagtgcccgtgcgatgcacggataaattttaaaaaatatattatattgcaacataaaacaaaaatatgttatatcgtgtattgaattaaattgtgaaaaacctttttatatacaacatttgcagattcatctattaattgttcattatcgttaagagaaaagggcatgatatcatataaatccgtcttcaattacaccataagtgggttgatatcattaatcatattattttttcacttcaaaatatgaaagatataaatttctacaattaccatatgctttcccatcaaaatttgatgaggggaaaagagacaattattcttaaataagaaggaataattattgctaaaaattttaaaaatttaatcttaaatagaattgtaaccaacataattaaataaaataagaataacaaattaaattttataatagattttagaattataatgagattttgatttgtttccatgattcaccctaattaattattttcccataaaaataattattgatattaatcattatcatttttctaaataaatctattttagaaatatattaaaatcaatttcctaaaattcatgaaaaataccaatttctttattactataaacgacaattattattattgttgttattat

SEQ ID NO: 71 - DNA, 6002 bp, Euphorbia heterophylla
attttccccaattttcctaaacccgaaacccccaaatccgttccttcgttttcaatcaggtcaagttttaacgggtcgccggtgtcattcggtctaaatcggcgccggacaaagggcgacagtattgtaatcaaaggtaaagctagttcgtttaaagtttcagcttcagtagccacagcagagaaaccctctacttcaccggagatagtgttgcaaccaattaaagaaatctccggcaccgtcactttgccgggttccaagtcgctgtccaatcggattcttctccttgctgctttatccgaggtatgaattgttcagaaattttcggctattgcattctgtgccgtttaattgtaagctgagctttcgttattgtcatgattgcattgaccttttgattttcttctatagctggttatagatatcagatttagcttaattatgtaaagtttatgctaattttttttgaattaaacttcaaattttgagctataacttatcttttagttcatgtgtttcccttgttccctatctgaagactttttttttgcaacgataacttcataatatggcctccatagctctgtaaagtagtgattttgagcgttttttgcttgaatattttgcttctcgtagaatgttgactaatagaacggtgcgtaaaatggtttttacatctattgttcagggcacaactgttgtggacaacttactaaacagcgatgatgttcattacatgcttggtgcacttaaaacactcggactacgagtggaacacaatagtgaactcaaacaagctattgtagaaggttgtggaggtcaattcccagtgggtaaagagtcaaagaaagatgtcgaactttttctcggaaatgcaggaactgcaatgcgtccattgacagctgcagttactgcagccggtggaaattctaggtctttttttactccctttcttaccctctttatataacccttgctttacaaaacaatcacacttcttttccacgacttatgaggttctatatggtttaacatgtatctaatgtgcttcagctacatacttgatggggttccaagaatgagggagagaccaatcggggatttggtaaccggtttgaagcagcttggtgctgatgtcacttgctcttccacaaattgcccacctgttcatgtcaatgcaaatggcggcctacccgggggaaaggtatggtactgttgtcacgaaaagttccacttgcaaacttttataagaacaaaatattttgacattagagaaatgattttgactatctgtctgctattaatttccgggtaaataattataacctccctcaagtttgacataatacgctactacctcattgggttttaaaaacctaatatatacctccctatgttttatattttctaattactatctccctatactttacttttattatattgttaggcccctttataggttattatgtcattattatatggaaaattaaccaaaatatacatttataacaaaactattattgttgtgatatttctatattcaatttttctttgatttttctattttatgtatgttttttctaacacaatcataagactggaatgtaataagatgttagaaaataagcaaaacaaacatcttatttgtgaaatatcttcaaaaatcaatacatatgatcactagttaagaaaatattgtaaaaaagtgtatggaacatcaatgattttgtgtgaaaatgcttaacgattgatagagtgaggtagaaataagaaaatgcaaaacatacggaggtataaattatgtttttaaaacacagggaggtgttagtatattatgtcaaaactgagggaagttgtaattatttatccttaatttccggaacttttcgggacagtagcttggaaaagcacgaaaatgtaacttttcggaaaaacaatcccaaactggcccacttattcagtaatgtatcacaatatatttcttcttttttgaattctaccctaaatttccgtgtcttcacttttaggttaagctttcgggatctattagtagccaatacttgactgctttgctgatggctgctcctctgtctcttggagacgtagaaatcgagattatcgataaactgatttcaattccttacgttgagatgactttaaagctaatggaacgctacggtgtttctgtacaacacagtagtagctgggatcgtttcttcattccaggaggtcaaaagtacaagtacgtattttttgggttcaacttccaaaactcccttgtggtttcctcattttcaaaaaggcccttagtgtaatttttttttcaaaagggcccttgtggtataaaaaattagcaaaaaaagaggagtctctctcaacaaagatagttgttttgacttggcaaagggtattttcatcaaaccccaaatttttcaaaatttaaataaaaaaattattatatttcagattgtcaactcaaggtaactaactttgatgtgaaaaataatcccctttttgcttattcttgataccacaaggactcttctgaaaaaaagttacacaagggcctttttgtacacgagtaaaaccacaggggggttcttgaagttaaccctattttttggattagtaaattcagaaagtttgattatgctgaagaaacgacaacctgaaatatcgatcaactaggtctcccggaaattcttatgttgaaggagatgcctcaagtgccagctactttctagccggagcagcaattaccggtggaactatcactgttgaaggttgtgggactagcagtttgcaggtaaatcacggaactttttcgtattagacatttacattttcacatgtgatgtaaattacgtgttatatgaaaatctagggagatgtgaagtttgccgaggttttggagaagatgggagctaaagttacctggacggagaacagtgtaactgtgactggaccaccacggaattctcctcatcaaaaacacttgcgtgctattgatgtgaacatgaacaaaatgccagatgttgctatgacattggctgtggttgcactttttgctgatggcccgaccgccatcagagacggtaatttccttttattttcatgaagggtaaacttcaaaaaagaaccttttggtttcgctcattttcaaaacggggtctaagaattttttttgtaaaattgggtttgtagtttcaaaaatttagcaaaaatgggcctttggcttcgaaatagtggtgttacattgaatatttataaaaaatttaacattctaataatttaaccttatcatttaaaaattaaatgctagagtttgaataattttcggagatttttttaagtttattatcataatttgtttaaaaaatatatttgcacttgtcaaaattttttaccgatgtgtattatattttgaataatcattccgaaaaaattcagataaaaacaaacaaagattaacaatttccgtgacatgttttaatattgagtagcctttatttgcgaattttctgaaaccacgtaccccgttttgaaaaaaaaaaaattcctcagaccccattttgtaaatgagtgaaatcacaaggtacttttttgaagtttaccctttcatgaattatgcttcgtattcttcaaataattcgaaaaggcggcctaacatttccatggacctgaactccatatataataccgagcaattttaacaatgattcgattgtaaaacctattgactcaaatgtaattcggatcctaaatacgaattccctttttctctctctcgatctttccagtggcaagttggagagtgaaagaaaccgaaaggatgattgctgtgtgcacggaactcaggaaggttagtttcttataaataaatttcactggatttgtatacagtaaaacgaaaatttgtcggcttatcgactctaattataatattatcaattgttggaatttcagttaggagcaacagttgaagaaggggaagattactgtgtgataactccacccgagaaactaaaaatagctgagattgacacttatgacgatcacagaatggccatggctttctctcttgctgcctgtggagaagttccggtcactatcaaggatcctggatgcactcgaaaaactttcccggactactttgaagttctccataggtatactaagcaatgaacaaaaaacccgaaaaacttgacaattgatactaaagagagaattgttgctgcaatcaatgcaattctgatgatttattcaagtaagttgatatttgttaatgtactggactagccttttttcttacctcaaatgttggctgttattgtagacaatgtattttgggttgaatccatattgtaatctatcgagttaataagcaatgaaaggatgaatgttctatttaagccctgtacttttggactacaactcaatgaagttcagttcagtttagctacgtgtagttataaatttactctaaaatacgttctattcagtttaattcagaaaattgtagtaattaatacaaaatataggcaaaacccatattgagccccttgccacctaaactttcagatgtccctttaagctcccccaacttggtacatttgacctccgagctccctcaagcttaaaattaggcatgaaagcttgagggataaagcttgagggagctcgcgtagttttaagctcgaaggagcttgaagggtcatttgtgtcaaactaggggagttcgaaaggtcatttgtgccaacttgagggagcagagagggtcaattgtgtcaagtttagagggttaggaggttcatccgaaagtttgggcacccaagaggaaaaaattgccaaatttaggaggctcaatatggatttcgcctagaatatacttaaatatagatgcatgactcttatggtctattaataaatactatagttacaagtaccgcttcctcttaggagaaaactaatgcatttttaaaaggttatgggcttgcaagtatcttttcaaagttttaagggcaataagcgaatgagataagttgagggagctagttccatgtagggaaaccctgcctgttgaaaatcgtttgtaagccatatgatagtacggtgaaaacaaaattttagcgaaactcatgtggatggcaagcaaaggaaaggagaatgactaaaggaggtaaggtgtaaaagagtaaatctaaaaatagaatcacattctttaaaagccaatctcaatctaacattaaataatgaagcatgtaacatgttgcctttgtccatatgacataacattattaaggcatgtcgccctcctcctatttatttttcttacactttctcacatggatgcctaccttggttgttggatatgtcttttatttatttatttccttcttaatttacacatttcactattaaacatcaatcgatctcttctaatatagtactttaagttaagaatattctcaattaaatgtggaatgaaacaaaaaataattgtatcaatagcaagaataaataattatacttaaaaaacatgtcccacaaaattagattcaatagatgtgaagtcaatattttacaagcaaccactaaattaggttcagtggtcacaacttcttttaaaagtggagaaagaagttggggtcctgagttcgagccccatattcctcaaaatttaaatgttcttattacctaaaaatatattattacaagctatatttgttgaaatctctaatttgctatacataaggtctaaaaatattagatctaacattaatgtcgtatgcttgaacaacatccactttatacattattcgatcacttgctgattattgaaaatacaaaagcactaaaagctacttcctccatctagatttaatggtttttttagaccttttttcacatcttttttagttgtcaattcctatttaccatgtacttttccagtcatgcccctattaattgcaattttgaaaagctttgagaatgaaata

SEQ ID NO: 72 - DNA, 5555 bp, Euphorbia heterophylla
attcgtgctgccattaaggaggctaaggctgtaaaagacaagcccactatgatcaaggtgaaatgatgcctctcttacagtgtgtttatatatagatataaacaatagaagtttttaaatggtgtttgtacttgcttgcaggtcactacaacaattggttatggatcgccaaacaaggcaaactcatacagtgtacatggaagtgcacttggtgccaaggaagttgatgctacgagggcgaacctaggatggccctatgagcctttccatgttccagaggatgttaagaagtaagccgacactactagctaggtttccgtctgttttttttaccgattttgatttgactttgatgactcttgtttcaggcactggagtcgccatgctgcagagggagcttcttatgaagctgaatggaacgctaagtttgccgagtacgagaagaaatacaaggaggaagctgcagagttcaagtccatcatcacgggtgaattaccggctggctgggagaaagcacttccagtgagtatctgcttcatatttcttgccccttttatcttttaggtggcgtttgggtctcggaattcctattccgtggaatagaaatagaagtgtgtggaaagatgtcaaatatagaagagaattctagacgcatggaaaagcttttccaagtttgtatacatctcatggaaaagctattcctttgtttcaaaaaggagtagcttttccttgagatgtatataaactaggaaaagcttttccatgcgtcaatggattctagatgattaatgtgtcatatttgacatctttccatgcatttttacttctattccatggaataggatttctgctaaccaaacgagcccttagagttattacttagtgaatttccacttgcattatctgaaaacagacatctcatattttctttgtcaagctttatgagcgtgtttggcatcaatgtttggcatgaaatttaactcaattcaaattattttatacctaagattgtaaatatgaaatgaattctttcaaaacaagatttccaacacaccccatgactaatttctccatatgtttgacctcatgcataatttggaaccaatcacttcagacaacccgatacacattcttaagagttaggacaaaacgaacattggattttcagacttgataatctcttaatccttcactattgaaatttttacagacatacaccccagagaccccagcagatgccaccagaaatctatcacaagccaatctaaacgcacttgccaaagtgctccccggtctcatcggtggcagtgcagatcttgcctcatcaaacatgaccttgctgaaaatgttcggcgacttccaaaaagacactccagaagaaagaaacgtccggttcggtgtcagggagcatgcaatgggcgccatctgcaatggcatagctctccatagccccggctttatcccctactgtgcaactttcttcgttttcaccgactacatgagagccgccatgaggatctccgccttgtgtgaggccggcgtaatttacgtcatgacccacgactccatcggtctcggagaagacgggcccacccaccagccgatcgaacacctggcaagcttccgtgcgatgcccaacatcttgatgctccgaccggccgacggaaacgaaactgccggttcgtacaaggttgctgtccaaaaccggaagagaccctcggtcctcgcactttctcgacaaaagctgccgaatctcgcgggaacctcgattgagggggttgaaaagggcgggtatacaatttcagataattcgaccgggaataagcctgatgtgattttgattgcgaccggttcggagttggagattgcggctaaggccggggatgagcttaggaaggagggcaaggcggtgagggtcgtgtcgtttgtgtcgtgggagttgtttgaggagcagtcggatgagtacaaggaaagtgttttgccggcggatgtgactgctagggttagcattgaggctggttcgacatttgggtggcacaagattgtgggaagcaaagggaaggcgattgggattgaccactttggagcaagtgcgccggctgggaaaatatacaaggagttcggtattacggctgaggcggttgttgctgctgccaaagaaatttcttagactgaagagcgagagtttggcgaaatgggtacccgaagagcgagagttttaccacgacttggtctctgttaaaataataaggtaaaaatatcaaggttaggtttttcttgtgatgaaatgggcaaggcagtccagaaaaagaggagggtttgattatgaacattgtgggctttgtaactgctcttgacttaagttgagtttttgtgtttttacttgtagctagtgaggttgacagttatttcatactgcgttttaatttattgagaagcaattgagtctcttttcttttgtctatttgacataagttatttctacttctaatatctgctaaccaccttgttagtagcagtagggttgagcattttgttatgccgagcctattaggctgcactgaattatcgaatattgattggagcattcggttatgaaagttcagtattatgtgaaactattcagttcggtacaaccgatcgctctactctaagtagcagactggttttcggatatactcgataaaattgataatctgatctaagcctttaaagttacttccgattttcaatttttgagagccgaattgaagtttgccgaatttaattggattgaacttaactgaagtatgctaaattaaactacatagaagtgacttgaacttagttgaacttacattattgaattgaaatgaaggaatggaatgatctgaattgtagttaaagagaagtaaaatgttgcatcaattggacccaccgcatatagtaggaaaagggtgagcaagtggatggagatatggtgaaatgttagcctaaatggggatttttggggtgggtgaggttgttgatcaatcaagccccacctatccatgcatgtcctctcgctggttttgaagctataaatcataattggccttcatttgatgatgcaaggaataacgaattttggcatattcttacacctaactccaccatattcaaagtagctaataaatttcatgaaaaataaatccatgaaaaagtgtggtcagagacaactttttaggaattcaattcattttatatgtaaatttttaaattttttatataaaataatttcaaaagaaattaatcgaattcttttgaaaaagaatgatttcaagcacatgagaattattttatccacaatattgtatcagtaaattttctcttaaattgataaaaaaaatagtgttaactgccattcggttatacttacaattgtctctttcaattactactatgcacgtaatttaaaaacaaaagtagaactttatttctatgccttattgccaaaatactcaggccataggctagtcattttgcagaaacgtttgcaccagtgcacaaacaatcgggcaaaatgtatggccagttagttgcctcagcattttggcaaatcggcaagttgtatttacatttttcaatagaaacgtataaaaaattttggaattcgaaaagatgtccattggtttccttagatgcatttttaaagctaatctagttatttcgaaggtatatacttcttcttctatatttacaatttcatattatatagtttctgtaattatagtgatattagaagaagggctaaaaggctttaccaacacaacctttttggtttggtcttcattcaaaagcccattccacaatcttcattttatgtccccacaaaacctacttctctctcaccaaacctacctattataatgaccaaaatactgatttggcaatacctaattggtaagttgcaaatcataacaataaaatcgacttcacactatcaaaaccttcgttaactaccacgtcccacagtgtttggtatagacgccacattctcagtctcaccaaccccctttcttttcagtccttcaaattcacaacattccaatttagcccacaaaattttattttctgtgcctccaattctattatacacaatcccctaacttaactttttatcactaaaaatcaaataaagttgatgggtcaatttcgaaaattgatgaaatatgaggttggtaggaagattgaaataccctcaattgatttgaatacaaccaactcctaattacaactaaaccctcaccaatctcaaatcaacgcacccatttctcttcttccccattgagaattcaagacctccatagggatcagagagttgcagagaacttgatagccctacttgaatggctcaagttagcaaattctgcaatggagttcaaaagacctacactttccccaatttttctaaaccggaaacccccaaatctatgccttcattttcaatcaggtcaaggcttaatgggtcgccggtttcattggctgtaaatcggagaaggggcggctgtattgttgctaaaggtaaaggtagttcttttcaagtttcggcttcagtagccacaacagagaaaccctcgactgcgccggaaatagttttgcagccaatcaaagaaatctccggcaccgtcactttgcctggttcaaaatcgctgtccaatcggattcttctacttgctgctttatctgaggtatgaattgctctggtttttccggcaacagcattatgtgcctttgaattgtaagctgaggagatttcattgttgtcatcattataattggtgcttccttcttgtttgttagaaacttagttgaaaggcaaacgaaattaggatcacatagattactaactgtcaatagtctatttaaattgttgttatcgatcgttcagggcacaactgttgttgacaacttgctgaatagtgacgatgttcattatatgctgggcgcacttaaaacactgggactacgagtggaagacaacagtgaaattaaacaagctattgtggaaggttgtggaggtcagttccctgtgggtaaagaatcaaagaaggacattcaactttttctcggaaatgccgggacagcaatgcgccctttgactgctgcagttactgcagccggtggaaattcaaggtcttttaccttccccctttttacccttgcagaattattggacttgtatttttgagactctatatggttttaatcagagtatgtggtttaggatttataagcttgtcttatacgcactcagtatgacctaatcaggtttaacagctagatggaatcaaattgtttcctctattttgtaattcatatggtttgcattttcgtctgaaatgggatttgggtacaaagcctgaatgagaaattttgatcgttaatttgaatgaagtggctgctttatctgggcattagatgctgaaattgtaatagggtgtattttcctggacatcttttttcaaaggatttggattctctaaagttcaaactcaatgaatggttgagattgagtgaaatgtacaactttagag

SEQ ID NO: 73 - DNA, 4647 bp, Euphorbia heterophylla
  unsure (1)..(4647): unsure at all n locations
ctttagagaatccaaatccttttcaaattatttcctagatctattgtcgatttctcatttatattttcagttttaggcaataactgaatgatatgcagttatggatggctttggactctggtaatgttttgttaatgtacactactgcctcccaagggctgagcataatgcggtttaaaccgaaacaccgatccaaaccgaattatgatattcggttcagttatttaatattcctgttttttattcggttttctgttcggtctggtttaagaggcaaaaattgtgaaaaactgaaccaaattataggttttcatatgcaagtaggcccaagccgaacccaaaccaatagtttcattttcatctataagtcattatctaattcaaccaaatgattcttttcttttattttctccaagtaaaccccaattaattgcaatttttgataaattctgttcagaaaaaccgaaatttagtctaaatgttttcactttcagctctgaaaattcagtttttaggtgtaattcgtttcggttcggtaagcatttttagataactcagctgggcttattcagtttagtatagccaaatgttaaacccctggcccctatcgagctctttcctctaaatttttctaattggaattaactatcaaatgtgtttcagctacatacttgatggggtgccacgaatgagagagagaccaattggggatttggtaaccggtcttaagcagcttggagccgacgtcaattgctcgtccacaaactgcccccctgttcatgtaaatgcaaatggcggccttcctgggggaaaggtataatatatcgtctcattaagtaaatatgaaagaacaagttttcctcttgttttgactagatccatcattattgtatcccttttaggttaagctctcaggatcaattagtagccaatacttgactgctttgctcatggcagctcccctggctcttggagacgtagaaatcgagattatcgataaactaatttccattccttacgttgagatgactttgaagttaatggaacgttacggtgtttctgtaaaacacactagtagctgggatcgtttcttcattcaaagaggtcaaaagtacaagtaggtattttcgttgatttacgaattccgaaaccctcgattttcgttcgaacaaaaaaatgaaaacccggaatgtcaattaggtccccgggaaattcatatgttgaaggcgatgcctcgagtgccagttatttcctggccggtgcagcaatcactggtggaactatcactgtagaaggttgtggcacaactagtttacaggtattttttgtagttattgctttgtgttggttaaaatttcagaatttttttcgtattagggatacaaagtgacttgttatatggaatttcagggagatgtgaagtttgccgaggttttagagaagatgggagcaaaagttagctggacagagaatagtgttacagtgactgggccaccgcgaaattctcctcgtgacaagcacttgcgtgccatcgatgtgaacatgaacaaaatgccagatgtcgctatgacattggctgtcgttgcgctttttgctgatggccctactgccataagagacggtaacttcatttaatcttttcgcaaaaataaggcttaatgcatctagaccccctatagttgtccctaaaaacctcttagccccctgaacttgtaaaagtggaccttatggccccctgaacttgtaaaggtggnccttatagccccttgaacttgggaaaagcgaacctcaaagccccttcatgataaccagggccgttcctggggcggggcaataggggcgacggccgggggcccaatggaataaggggcccatttttaaggattattaagttatttttattaaattagagtttaagttaattaaatagttcttttgtgtaaaatattaagaataaaatactattaaatctaaagtgattagttagttaaagacacgtgttagctttgtttgaattaaactctaatctcattgatttttcttacctccattatcaccaccatcatcatctcttaacatttatttccttacaaattttctttagtctattcaacttctaaatttaaaattgaagttgaagtgcattcatcttccatactatactgctatcaatctccaaatttcattcttgttcaatccttttagtacctataaataattcttcatttactctttcaacaacatgtatctaaaaaaaaagttagagcatgttgatgtaaactttattagcgattttgcggttaggtttactcatagacatcattttatttgatctatgataaagttttagttatagtattattttctgctttataatgtgaaattttgatgttctgtttaatctattattaaatgtcgtagtaaaagttcaatattatatgtttcattttaaattttaactcattaatagggccccgatttttattatcgcccataggccccaaaaaggtaggaacgggcctgatgataacatgcccaattttgttccggttaattaatcttcgattcaatctttatcaaaacaatcttggagtcaatttctagaaaaataatatttgaaatatcaacatcaagggcctgtggggttcacttttaacaagttcagggagctataatgtcaagtttaacaagtttagggggttcagggacctttgtaagttcaggggattaaggggtttttagggacaactatagggggtttagatgtattaggcccaaaaataattataaatttgaaagcgtagtttaaattgccaaaccgagtaaactgtttcggcattctcttgtttccagtggcaagttggagagtgaaagaaaccgaaaggatgattgctgtttgcacagaactcaggaaggttagttgctgataaattttggctattataaaaacaaaacttattggcatataattataatttataatgttggattaaattgattaattattccattatatattcagttaggagcaacagtagaggaaggagcagattactgtgtgataactccgccggaaaaactaaatataacggagattgacacttacgatgatcaccgaatggcgatggccttctctcttgctgcctgtggggatgttccggtcactattaaagatcccggttgtactcgaaaaactttccctgactactttcaagtcctccaaagctttaccaagcaatgaccacgaacccctaaaacattggagtactagaaatggatcaggctcttatattcaatggatcattcaagtgagtttatgttattaatgtgccggacataacagattttgttagacaatgtataccggatgaatttgtattttatgttttgtatttgtattctatcaagttgatcagcaataaatgggtgaatgtgttaatttttgtgatatacttacagtgttattattcagttcgaccggttttactgtgaaccggctatggtcacagagcgatttagttaaaattgggttgaacatgaaaaaatcggtaaacccttgtggcaaaaataaaatgcgttgctaaacacataaaaaagatttgtaatagccttatacgttcttttccaaaattcctttggcaactttgtggaacgtcgtaatagacctagaaagcggtgaaatagtcacttgaaatcataaactctctctctatatataccttttagcccttcaatttctttactaattgaagcaagtaaaatacaaactcatttctttttcaagttagtgatataagtttgtttctttaacacccaaagataacacatccccaagaaggaatactcattcacttgttgaagaattatcttctttattagttgaaacataacttacatctgaataatcttcgaaaaccaaagaaaattccgtataggtcaaaccatgatccttggttcctttgaagtactttaatactcggcctaaagcttgtcaacgatgcgaactatgactactagtatatcaaccgagctttccaacaacacaagctatatatggcttagtgctaatcacatacacactttttatatacacacttgcatacttggttgataacaaaaccattagataaaatcacatcatcgaacttttaatgtcacacttttctgtgggcgttttagcccatataacaaattctttagcttgcataccttattttctcaacctgacataacaaacccttgaatctgattgtttttcgatgcccgagaccaaagaatatcattataataccatctatataaaaaaatgagactgaatcacctatatttcggatatcaacaggtttccacaacttcttcaacacttattacacaaactgccttaaaatttacaatttgatgggtatagtagatgattgcagaaaggctttttttaagctcaaaaatcacgtggatgacatggaaaggaaaagaggaagaagctgtaaagataacatcacattcctcaaaaaccaatctcaatctaacattaaatcattaggcatggaacatgttagctttgtctttataattaaaatattatttatctccattttatttttattttttaattttatacactttttcacatgggctagtttgttggat

SEQ ID NO: 74 - DNA, 378 bp, Euphorbia heterophylla
ttatattagctaaaatttggtagtctttgaaatttaaactcaaaagcttgacatgttttttgtaggtcctcttggacagggaattgccaatgctgttggtttagcccttgcagagaagcacttggcagctcgattcaacaaaccagacaacgaaattgttgaccactacacgtatgataacctcctctataattatgttactttgtgttgttttgtttaatgctagattaatgtgacatgctgtaatttaatattgttctgtgtttatctttttgttagatattgtatattgggagatggttgtcaaatggaaggaattgcaaatgaagcttgttcccttgctggacattgggggcttggaaagcttattgctttcta

SEQ ID NO: 75 - DNA, 220 bp, Euphorbia heterophylla
gtgtgaattagttaaaaagaccattatttctagacgaagggaatattaagtaagaaaaagggaaaagcaaaaaaatataaggaccaatcaaagacctagaaaaagctaaaaatagtgccaatacattgtagtatagatacaaataaaaataattcacattactcatttatattaccttaaagtatgattagtgtcacaattttactgttctatcttctgt

SEQ ID NO: 76 - DNA, 4459 bp, Euphorbia heterophylla
gtctaatgaactttgatactataatcaattggtgaatattgtgattttattttttataagataataggtactttatttttcattattgttggattagtgatgtggaattcaaacaatggtagagtagcatataatttttaattatatttattacatttatattatataatctcacaaaatataattataaaaggtgatatgcttatatatctataataaccactattaatcttggttgttagcaataagagttagtctaagtggtgagtggtttggtatcgcttaagcaaggtcttgtgtttaattctggagtacgcaaaaaattttatcgagagactcacctaccatagttaggtgcgcgacccgtatcgaatctggatgtagtcgaaacaaagtttcggtaaatcagatgaacaatcgaagaaagaacctcagcgtttgttgaataagaaattagaaggcttaccaaacacagtattttggttagtattcaaaagcccattttcaatgtccaccgggtccccactaaacctacccactttctatctctcaccaaacctgcccttaatggaccaaaatgctgatttggcaaaatctaattggtaagttgctaatcacataataacaaaattgactctatatcttcaaaaccttggctatctaccacgtcccactaccatacgccacttctcaatcttaccaacccctttttctttttggccccataatattcttaacatttcaatttagcgatttgagcaagtcaaatcatttttttaatttcatttgtcaaactccattttgaagaatttacagttctttcattctaactatcattctcatttttcatattaaattatcaaaaaataataatattttattattatattaatttatgtagatcgtttatgttatgttgtactgaactaataaaataattaaaaacatcaaaattcaaacaaagtaataaaataatgattccctgaaatagagaatgcccatatacgagaaaccctcgttttgaagaataccctatggagaatggttggacttaggtcatttttatttagattactactcaatgtagttcaattcagtaatcaataagaattggtccaagtggtaagcgacttagtatcgctcaggcaaggtctcgagttcgaatcctggtgtatgcaattcggatctggatgtagttggagcaaagctccggtgaaccagatgaataacaaaaaaaatgtaaacttttagttaatatttgttattgtaattgaaaatcaaataaagttgtgggtcaaatttggaaaattgtgaaagattggaataatgaaacacctcaattgtcgttacaataacgcctaaaacctcaccaatctcaaatccagagcagccatttttcttcttccccgttgagaccagcaagaatcagagatacacggagattggtggagggggatcctgtagctctagttaaatggcacaagttagcaaattctgcaatggagttcaaaaaacctccattttccccaattttcctaaacccgaaacccccaaatccgttccttcgttttcaatcaggtcaagttttaacgggtcgccggtttcatcgggtctaaatcggcgccgaacaaagggcgattgtattgttgttaaaggtaaagctagttcgtttaaagtttcagcttcagtagccacaacagagaaaccctctacttcaccggagatcgtgttgcaaccaattaaagaaatctccggcactgtcactttgccgggttctaagtcgctgtccaatcggattcttctcctcgctgctttatctgaggtatgaattgttctggatttttcggcgattgcattctgtgccgttgaattgtaagctgcggttttagtataatcataattagatgaagcagaaaggaacttagttcttttgcattttatgttcagaatcacatagatcactaattgttggggaaatctggaaatgaaggctagataaatatgaagttatagcgaacattgtgattgaaacttattgacaagaacttagaacgaatgttgttgtgatgttatgaaacaaaaaagtctgtaaaacgttatatttgccaatgcgttctctctatatatatatatagagaaccgaaataaccgtcatatgttaactgtttttgtagttattttcgtctaagtcgcgacatggtccaaatcccaaattcatgaattttccaagggaacttttactttagctcgaccccagtttggggcactacccccgaaatccgaacattgaacttgaacaaagcatgcactccacactctcgtgacttgttcaatgaaatatcacaatcgcacaactagttgatctaattacactaaaatactactaacaacacttaatcaacagtctatcatgttgttggtttttctttgaacttctgaagcaggatagataaagatcgttccttcccactaattgatactatcattgcattgacctttaaattatcttcttttggtgcatatagattacagatttagttaaatcacgtaaagtttgggctgaatttttgttaaaataaacttcaaatttgaaatctttactaatttttcagtccctaggtttccatatcccctttatttctaaaagccgttgttttgttggcatgccttataattgatttttgtttatttcttgcaataaacaacttaaaaactctggccttggaagcctttttatctgtgtaaagtagtgattctgagtgttctacgttcaaaattttgcttctcgagaccataaaacggtgctttacatctattgtccagggcacaactgttgtggacaacttactaaacagcgatgatgttcattacatgcttggcgcacttaaaacattaggactacgagtagaagacaatagtgaactcaaacaagctattgtggaaggttgtggcggtcaattcccagtgggtaaagagtcaaagaaagacattcaactttttctcggaaatgcaggaactgcaatgcgtcctttgactgctgcagttactgcagccggtggaaattctaggtttacttttccccctttttttaccctctttagacatgccttgctttatagaacaataagcacttattttccacgacttatgagattctatatggtttaacatgtatctaatgtgtttcagctacatacttgatggggtgccacgaatgagagagagaccaattggggatttggtaaccggtcttaagcagcttggagccgacgtcaattgctcgtccacaaactgcccccctgttcatgtaaacgcaaatggcggccttcctgggggaaaggtataaatatatcatctcattaagtaaatacgaaagaacaagttttcctcttgttttgactagatccatcattattgtatcccttttaggttaagctctcaggatcaattagtagccaatacttgactgctttgctcatggcagctcctttggctctgggagatgtagaaatcgagattatcgataaactgatttcgattccttacgttgagatgactttaaagctaatggaacgctacggtgtttctgtacaacacagtaatagctgggatcgtttcttcatcccaggaggtcaaaagtacaagtaggtatttttatcgatttacgaattaggaaaccctagattctttcaaacaaaaaacgaaaaccttaaatgtcaatcaggtccccgggaaattcatatgtcgaaggcgatgcctcgagtgccagttatttcctggcaggtgcagcaattaccggtggaactatcactgtagaaggttgtggcacttccagtttacaggtattttttaaaatttcagattttttttcgtattagggatacaaagtaacttgtgattggctgcttgttctatatgaaaattaagggagatgtaaagttcgctgaggttttagaaaagatgggagcaaaagttagctggacggagaacagtgttacagtgactgggccaccacgaaattctcctcgtgacaagcacttgcgtgccatcgatgtgaacatgaacaaaatgccagatgtcgctatgacattggctgtggttgcgcttttcgctgatggccccactgccataagagacggtaacttcgttcaatcttctcgtgaaaataataattaatattcttcaaataatctgaaaggacattttcttgattccagtggcaagttggagagtgaaagaaaccgaaaggatgattgctgtttgcacagaactaagaaaggttagttgctgataaatttcggctattaacaaaacaaaacctatcggcatataattataagagttaacttcaaaaacataacctgtggtttcacttatttttaaaagggggtctgtgaaattttacattacgaaacatggtctgtggtttcaaaaactttgcaaataaaggatcctcaat

SEQ ID NO: 77 - DNA, 1339 bp, Euphorbia heterophylla
tattcagttaggagcaacagtagaggaaggagcagattactgtgtgataactccgccggaaaaactaaatataacggagattgacacttacgatgatcaccgaatggcgatggccttctctcttgctgcctgtggggatgttccggtcactattaaagatcccggttgtactcgaaaaactttccccgactattttcaagtcctccaaagctttactaagcaatgaccacgaacccctgaaactttactagaattggatcaggctcttatattcaatggatcattcaagtgagtttatgttattaatgtgccgggcataacagattttttataccggatgaatttgtattttatgttttgtatttgtattctatcaagttgatcagcaataaatggatgaatgtgttaatttttgtgatttacttaaggtgttattaatcagttcgaccggttttaggtgaaccggctatggtctcggagtgatttagttaaaaattgggttgaataggaagaatcaaacccttatggcaaaaagaaaatgtcatgttaaacacataggaatgcgttgtaatagccctttatgttttattcaaaattcctctggtaacatgcagaatgttgcaaaggacctagaaagcagttaaatagccacttgaaaccataaattctctctctatatatattcttttaagataaaaaatcggtaaaattagcaatcatgtcaataatattgattatactacatatcattaacttcacgtttcacgagtatgaagtttggtttgatattgataacaatgtgtacttattgaaagggaattataaaaatgacttggataatatctaaagttgtaataatactttcaaatagaaacgaagttgatggttttcccaaaatttttagttgaataaaatcaaagtaaaatcatgaacttagaataaattttcattgtgtaaaaaaatgaaccaataacaatcgttgctgaaaatatcctataagtgttgccaatgccagatttttataaacctggaatgagcatttgcaatgctttgaagacaaagagttgctaaaaggcgtgtccattagatcaattgcatctgtttataacaaaaacattgcaaaatggcatgtccattcgagcagttgcaataattcataacaaaagtgttgcgaaatgtagcttccggctctcataagctaagtgtcgtaatagaattcgaacaagcatgcacttcctgctctcctgacttgttcgacgaaatattacaaccgcattgatcaactagttgatctaattacacttacctacaatcctccacattttagtgtaatccatga

SEQ ID NO: 78 - DNA, 1668 bp, Euphorbia heterophylla
cgttttcaattaggtcaagttttaacgggtcgccggtttcatcgggtctaaatcggcgccgaacaaagggcgattgtattgttgttaaaggtaaagctagttcgtttaaagtttcagcttcagtagccacaacagagaaaccctctacttcaccggagatagtgttgcaaccaattaaagaaatctccggcaccgtcactttgccgggttccaagtcgctgtccaatcggattcttctccttgctgctttatccgagggcacaactgttgttgacaacttgctgaatagtgacgatgttcattacatgcttggtgctcttaaaacactgggattacgagtggaagacaatagtgcgatcaaacaagctattgtggaaggttgtgggggtcagttccctgcgggtaaagaaccgaaaaaggacattgaactttttctcggaaacgccgggacagcaatgcgccctttgactgctgcagttactgcagccggtggaaattcgagctacatacttgatggggtgccacgtatgagagagagaccaatcggggatttggtaaccggtcttaagcaacttggagctgacgtaaattgctcgtccacaaactgcccccctgttcatgtaaatgccaatggtggtcttcctgggggaaaggttaagctatcaggatcaattagtagccaatacttgaccgccttgctcatggcagctcccctggctcttggagacgtagaaatcgagattatcgataaactgatttccattccttatgttgagatgactctgaagttaatggaacgctacggtgtttctgtaaaacacactagcagctgggatcgtttcttcattcaaagaggtcaaaagtacaagtccccgggaaattcatatgtcgaaggcgatgcctcgagtgccagttatttcctggccggtgcagcaatcactggtggaactatcactgtagaaggttgtggcacttccagtttacagggagatgtaaagttcgctgaggttttagaaaagatgggagcaaaagttagctggacggagaacagtgttacagtgactgggccaccacgaaattctcctcgtgataagcacttgcgtgctatcgatgtgaacatgaacaaaatgccagatgtcgctatgacattggctgtggttgcgcttttcgctgatggccccactgccataagagacgtggcaagttggagagtgaaagaaaccgaaaggatgattgctgtttgcacagaactaagaaagttaggagcaacagtagaggaaggagcagattactgtgtgataactccgcccgaaaaactaaatataacggagattgacacttacgatgatcaccgaatggcgatggccttctctcttgctgcctgtggggatgttccggtcactattaaagatcccggttgtactcgaaaaactttccctgactatttcaagtcctccaaagctttactaagcaatgaccacgaacccctgaaactttactagaattggatcaggctcttatattcaatggatcattcaagtgagtttatgttattaatgtgccgggcataacagattttttataccggatgaatttgtattttatgttttgtatttgtattctatcaagttgatcagcaataaatggatgaatgtgttaatttttgtg

SEQ ID NO: 79 - DNA, 783 bp, Euphorbia heterophylla
atgttgaaggagatgcctcgagtgccagctactttctagccggagcagcaattaccggtggaactatcactgttgaaggttgtgggactagcagtttgcagggagatgtgaaattcgccgaggttttggagaagatgggagctagagttacctggacggagaacagtgtaactgtgactggaccaccacgcgattctcctcgtcaaaaacacttgcgtgctatcgatgtgaatatgaacaaaatgccagatgttgctatgacattagctgtggttgcacttttcgctgatggtcccactgccatcagagatgtggcaagttggagagtgaaagaaaccgaaaggatgattgctgtttgcacagaacttaggaagttaggagcaaaagttgaagaaggggaagattactgtgtgataactccacccgagaaactaaatataacggagattgacacttacgatgatcaccgaatggcgatggccttctctcttgctgcctgtggggatgttccggtcactattaaagatcccggttgtactcgaaaaactttccctgactatttcaagtcctccaaagctttactaagcaatgaccacgaacccctgaaactttactagaattggatcaggctcttatattcaatggatcattcaagtgagtttatgttattaatgtgccgggcataacagattttttataccggatgaatttgtattttatgttttgtatttgtattctatcaagttgatcagcaataaatggatgaatgtgttaatttttgtg

SEQ ID NO: 80 - DNA, 2185 bp, Euphorbia heterophylla
gacagactttgacccaggcaattgaacagtaccagagatctctttgatgggttgtaacacaatttctgggacagatgaaggtttctcagctgcagcagcaacagaagcttgaatcttgggaacaattgatgattgcccaccaactcttttattggttaaagacatgaactttggagaaattctcaagtttgatccaaaattaagagtttttgaagatttgggtaactgggttttgggtaaagtatggtgcaattgaccagtatggacaccattgttgatggtagtagcttgagccattattcttcctctgaatttggcgttgtttgttggctgaaaaagttaggtggattttaggcttttaagagagagaagggaaagaagagggcttagttcttaccaaaccaaagttttggtgggcaaagagaaagtgggttggtgtagactctagtagagtagagggaatcattataagagtttgttgttgaattttttaaaagttttttgcattcctccgatttgcaacacggtttacctactgtttatttgaattttttgtgttgagaaaaggcttacaggcttgctcttgtatatgtgtatgtatttgctttgtggttaaatatgctgcatgttgtaatgaaaactctgcccggggatggtgggcttacacgccaaagaaaaagattgttttccacaagcaaaaatatcccattggcaacagcgtgcaattatttagggaatggtgttagagcattaaaattggaaaataaatgagctctcattttgttcaaaccatgagaattttcccctggtccaatattcaggcgttttgtttcatttgtaaaaattacgatcatatttctctttagtgaagcaactgattggaaaactttggtatatgccatatctttccaagttaaagagttcccaggcatcatcctcaatgatcttcctctatattcctgtacaaatattgttgataggaagttcattcatgccaataacaatatgtctcttgcgaatttctagaagaccagaaatttgttgtgacctgtggagttcttccaaaagtatcctctgtgcgacgcatgaaaaaagcctttgggctagactactgagatgcagctgcctggtaattcatgcctctctcccaagagagtacgagaagtcatttatagccgcttaagagagccaaggatcaatttaggcgtgttctatttccatatcttaatgtatcactgaagtttagcaagtaaacaaacatcacaatccctgatgcttgcatagtcatggcaaatgttatactctttgtttacatatgaaaaaccagatattactccatatttttagaaaccagcaaccaaaggagcttaaatggtccctgctcctaagtcatatctcttggcaatggggtgtttgtagatcttgagtgctgccagtccacttactgtaatgcaatacatcaatattgagctagtttctcatgggaaaaaaccatagaaatgggacaaatttgatgttaatgttctgtaatccaacttgaggattagttttatcacataaaagctacattgaaagttctattattattttgagtttgcatcttatgttgtttttcctttgtgattttatccattttcttaactagttattcgtttcctgaagtttttagtgtcataactcctaatcacaatcatgctacagggcacaacagtggtcgacaacttgctgtatagtgatgatattctttatatgttggacgctctcagaactcttggtttaaaagtggaggatgatagtacagcctaaagggcagtcgtagagggttgtggtggtctgtttcctgttggtaaagatggaaaggaagagattcaactttccttggtaatgcaggaacagcgatgcgcccattgacagctgcggttgccgttgctggaggaaattcaaggtttgtccaattatattctttatgtgagtgttgttttttgtgttagtttcaatcatgaaggtactaatgcagaagccgtacccctgaaattttcttattttgtatatatcaattggtaattgatgtaagatatttttccgagaggaataaaaacagggggatagagaatattaaagtattgttctatcacattaactttttatcaaaggtgtacattgtgtttgtgaagtttatagagct

SEQ ID NO: 81 - DNA, 1702 bp, Euphorbia heterophylla
attttcctgaacatcttttttccaaattatttcctagatcactgtgaatatctcattcatattttcagttttatgtaataactgaaggatacgcagttatgtatggctttggactctttgtacaccactgcccccctactagggctgagcataatgcggttttaaccgaaacaccgacccaaactgaattatgatatttggttcggttatttaatatttcagtttgttattcgtttttctgttcggtctggtttcaagaggcaaaaattgtgaaaaactgaaccaaattataggttttcatatgtaagtaggtccaagccaaacccaatccaatagcttcattttcatatgcaagtcatcatctactttaaccaaataattcttttcttttactctctccaagtaaaccccaattaattgcaatttttgttaaataaattctgtctgttcagaaaaaccgaaatttatccgaaatgttttcagttctgaaagttttatttttggctgtaattcggttcggtttaataagaattttagaaaactcagctgggcttattcggtttggtttacccacatgctcaacccctggctcctattgacctctttccttaaattttttctaattgcgatcaactatcaaaaatgtttcagctacatacttgatggggtgccacgtatgagagagagaccaatcggggatttggtaaccggtcttaagcaacttggagctgacgtaaattgctcgtccacaaactgcccccctgttcatgtaaatgccaatggtggtcttcctgggggaaaggtataaatatatcatctcattaagtaaatacgaaagaacaatttccttcttcttttgactagatccatcatcattgtatcgcttctaggttaagctatcaggatcaattagtagccaatacttgaccgccttgctcatggcagctcccctggctcttggagacgtagaaatcgagattatcgataaactgatttccattccttatgttgagatgactctgaagttaatggaacgctacggtgtttctgtacaacacactagcagctgggatcgtttcttcattcaaagaggtcaaaagtacaagtaggtatttttatcgatttacgaattaggaaaccctagattctttcaaacaaaaaacgaaaaccttaaatgtcaatcaggtccccgggaaattcatatgtcgaaggcgatgcctcgagtgccagttatttcctggcaggtgcagcaattaccggtggaactatcactgtagaaggttgtggcacttccagtttacaggtattttttaaaatttcagattttttttcgtattagggatacaaagtaacttgtgattggctgcttgttctatatgaaaattaagggagatgtaaagttcgctgaggttttagaaaagatgggagcaaaagttagctggacggagaacagtgttacagtgactgggccaccacgaaattctcctcgtgataagcacttgcgtgctatcgatgtgaacatgaacaaaatgccagatgtcgctatgacattggctgtggttgcgcttttcgctgatggccccactgccataagagacggtaacttcgttcaatcttctcgtgaaaataataattaatattcttcaaataatctgaaaggacattttcttgattccagtggcaagttggagagtgaaagaaa

SEQ ID NO: 82 - DNA, 1400 bp, Euphorbia heterophylla
tcaaccaaatgatccttttcttttattttctctaagtaaaccccaattaattgcaatttttgatgaactctgttcagaaaaaccgaaatttagtcgaaatgttttcactttcagttctgaaaattcagtttttaggtgtaattcggttcggttcggttcggtaagcatttttagataactcagctgggttattcggtttagttcagccaaatgctaaacccctggcccctattgagctctttcctctaaatttttctaattggaattaactatcaaatgtgtttcagctacatacttgatggggtgccacgaatgagagagagaccaattggggatttggtaaccggtcttaagcagcttggagccgacgtcaattgctcgtccacaaactgcccccctgttcatgtaaacgcaaatggcggccttcctgggggaaaggtataatatatagtctcattaagtaaatatgaaagaacaagttttcctcttgttttgactagatccatcattattgtatcccttttaggttaagctctcaggatcaattagtagccaatacttgactgctttgctcatggcagctcccctggctcttggagatgtagaaatcgagattatcgataaactaatttccattccttacgttgagatgactttgaagttaatggaacgttacggtgtttctgtaaaacacactagtagctgggatcgtttcttcattcaaagaggtcaaaagtacaagtaggtattttcgttgatttacgaattccgaaaccctcgattttcgttcaaacaaaaaaatgaaaacccggaatgtcaattaggtccccgggaaattcatatgttgaaggcgatgcctcgagtgccagttatttcctggccggtgcagcaatcactggtggaactatcactgtagaaggttgtggcacaactagtttacaggtattttttgtagttattgctttgtgttggttaaactttcagaatttttttcgtattagggatacaaagtgacttgttatatgaaatttcagggagatgtgaagtttgccgaggttttagagaagatgggagcaaaagttagctggacagagaatagtgttacagtgactgggccaccacgaaattctcctcgtgacaagcacttgcgtgccatcgatgtgaacatgaacaaaatgccagatgtcgctatgacattggctgtcgttgcgcttttcgctgatggccctactgccataagagacggtaacttcatttaatcatttcgcagaaataaggcttaatgcatctagaccccctatagttgtccctaaaaacctcttagccccctgaacttgtaaaagtggaccttatggccccctaaacttataaaggtggaccttatagccccttgaacttgg

SEQ ID NO: 83 - DNA, 584 bp, Euphorbia heterophylla
tctagagacggtattaactcctttctgatacattacacttttcttgtgctatatattgtttcaaatttgataattcgatcatgcttcaaattttgcacacagccgtaatccatggttataaaatgactatgacacttgtcttgttactgaaaagtgcatacagtaacaaagctgatgttacttcttagtttactctaataatggttggacggtcactggcgcacatccccatggttggaagttgtgaatattgttgtcataatggcttatggagcatcttttggtacacttcaggagtaaaagaccactagtccagtatagggttaatcacctctagaactagttagtcacatatactcggaaaattattcatattttgtggttacatgcgttcgtttatctgcatcttgcctagtgtctcctcttgaaatcattcatatatgttctttttttccccttcatctgttacatgttcaaaatatgcttacaacgaaattgggtaacttgaccagttgctagctggagagtgaaggaaacagaaaggatgattgccatctgtacagaactcagaaaggttagccaca

SEQ ID NO: 84 - DNA, 1250 bp, Commelina diffusa
cccaaatcaaaatggccgccaaaaccctagctctctcgccgtcgtcgccggcggcgatcgccggagctcgccggagctcaccagcgccgccgccggcgctggtacggctcggatccggcccaaaggcggcgcctttgggcgctctgagggtctttgggcggcggccggcggcgctgcgggtcgcggcggcggcggcggtgaagacggcggcggcggcggaggaggagatagttttggagccgattcgggaggtttcgggggttgtgaagttgcccggatcgaagtcgctgtcgaaccggattttgctgctcgcggcgctggccgagggaacaaccgtagtggacaacttgttgaacagtgacgatgtccgctacatgcttgctgctctgaggaccctgggactatccgtggaggatgatgttgcaaccaaaagagcggttgttgagggatctggtggccacttcccagtcggtaacgaatcaaaagaagttgagctgttcttaggaaatgcgggaactgcaatgcgaccactaactgctgctgttacagcagctggtggaaatgcaagctacatacttgacggggtgccaaggatgagggaaagacccatcggagatttggttgatggcttgaagcagcttggtgctgatgctgattgtttccttggaaccaactgcccacccgttcgtgtaaatgcaaagggaggtcttcccggtggaaaggtgaaactctctggatcgattagcagccagtacttaactgctttgctcatggcagctcctttagcccttggagatgttgagattgagatcatcgacaagctcatatcggtcccctatgttgagatgactctgaaattgatggaacgttttggcgttaaggtagagcattctgaaagctgggacaggttcctcatcaagggtggtcagaaatacaagtctccaggtaaagcttatgtcgaaggtgatgcatcgagcgctagttacttcttggccggtgctgcagtcactggtggcactgtcaccgttgaaggttgtggtacgaccagtctgcagggtgatgtgaactttgctgcagttcttgagaaaatgggtgcaaaagttacatggactgagaacagcgttacagttactggtccaccacgcgatccttcgaagagaacaaacttgcacggaattgatgttaatatgaataaaatgccagacgtcgctatgacacttgcggttgttgcactgtttgctgacggccct

SEQ ID NO: 85 - DNA, 9352 bp, Commelina diffusa
ttattattattattttcattgttccggctagttctagcccccccactgtccatcttcccgtctaccgccctcctacatcctctctcacccatttcagcccctcttccacacctgaccactcacagccgacggccatctaatcatacttagaggacatgttctaacaaaaagattaggcttccaccttttaatacgaaaaattaaagaaataattataaaattttaaatcactttcgaaacaacacaaaaaaaaaaaataaaaaaatgcaacatccttgataataaactcaaactagaaaaataaactaaaacaaaaccaaaatttcaaagttgttctataaaaaaaaaataaaaaaattccaagacttgcttcttcggctcttttgtagtcgatcggtcttcaagacaagttagctgctatgctcgactcttggagaaatgttcattgcttgagcttgaacccacctcaaactcttcggataggcggtctcttctccctactcccactttgtcttcggttccgaggaagaatgccatcttttctacttcccccatctctttggttctctcagccactccctcggggctttctaggatgtctcgaggcagaacgagaaccatggtgtctaggtactcagtcgatgtttgacctctcggagctcgaagcacgaggaagtcgaaacgatgagagaaggtttgtttgtcaccgctcggcgtggcgcaacgttatcgtaggtgattccgcgattcaggttaagcacagcctcgatccagctaatggatcagaataggggagtctcttcactgtagattttttttcttcttgagttgtttcactttgttcttatggtgggacccttcggggtcccatatacgtaggtgcgcaccgatgtttgtttgtatggctgtggacgtccttatgtcaactttttcggcttcccttcttggatcccaaacacgagaggtgcaccgccactgcatatgtgcaccacactttttcattctactaatactaggtcgtatagttcgggttgaaaaaagaataaaataataagggtgttatacatatttttaatgatcttagtaaagcttttggtttgatgatataaaatgtgttatttttgtttgaatatatgactacttcatacataacttttatgatgtcagtaggaattttgcattgattgtataaatgtgtcatcttgcttaaattaaacaaattcataactggttttatacatattttttatgatcttactaggacttctgcattgattgtataaaggtgttatttttgcttgaatttatgactatttttatacataacttttatgatcttagcctaaattttgcattgattgtataaaggtgttatctcgcttgaatttatgattggttggaattttgtgtatttgcattgtatattgattgtataaaggtggcatcttgcttgaattcatgagtagttttattcataacttttattatcttagtaggactaatgtattgattatataaaggaaggagtcattttacttgaatttagagaggagttttagttatgtgattgctgagaaatggaaatcatattgtttaatggttggtaacttgaaccttgggagagtgactatgactactttagcattttacatatattataagattcaatgtttggtagcagaaagtatatgcttttgaaaagatctttcaggagccttgtatcacaattaacaactcaatctgctaaatctgaggataattggagtgttatacttgtagaatgttagattgcttatttacttaaaaaatattcgtcatatataggctgttcattgatagctatggtattttcggtcaatctgtctattcaacaaataaatgggagtttcatctatcaatatttatgatcttggtcatcaataatgaattttccttaagagtttgtatacttgattgatctgctaactcctattatgtcaatgctaattactattgtcggaatcttagttcttataggggaattgaagaatgttgttagctttatttttccgcaactgattgccattaattcgatcagggaacgaccgtagtggagaacttgttgaacagcgacgatgtctcctatatgattgcttccttaaggacactgggaatctctgttgaacatgatgttgcaaccaaaagagcacttgttaaaggatctggaggccaattcccagtcggtaacgaatcgaaagaagttaagctgttcttaggaaacgcgggaactgcaatacgaccactaactgctgctgttgcagctgctggtggaaatgcaaggttttttatcacattttaaatcctggcaatgtttcttcgtctgcgtattcctaaattctatttttctgtttatcttcagctacgtacttgatgggttgtcgaggatgagggaaagacccatcggagatttggtcgatggcttgaggcagtttggttgcgatgctgattgtttcctgggaaccaactgcccacccgttcgtgtaaatgcgaagggaggcctccgtggtggaaaggtttgtatgacaattagttgatccaagagagtttcatgccatgcttcaccaccgatgtttactcaacaaaagatgcataagaaatgaaagcaaaccactctattctgaccaaagatccggtcgaatatggtcatattcggttggaaattcatattttctgactgaaaaaccagttgtagtgatcggttgtctcaggcctggtcgcaaactgaaccacccctcaattcgaaatatacggtcagaataggacctgacttttgtagtgtatgcccgacaagtgctacgccagtcattggtataaaaaaattagggatatgctttagtatccatggaacaagagtagcccggttcgttttcccaaattagtgctaaaatttcaagaatgagttattcctgtgctcaaaagatatatatcactcctgcctaaacttgattttagcttatctttgattagagaattgatgtagttaattcaatttgcctaatgataggactaacaaaaatccaaaaaaaaaaaaactttgataatgctaaagactattaactatgctgattcattttttgttttttaattgataaaggtagtcttgtttcctatttccttcttgtttttttatcaatagaaactaggatttggaattggcttgctaagaccctatgattaattcgattgaaagagtaactagatgctgctggtgactagaagatgaagaaggcgagagatcgtattccattccagtaaatttagtggaatcaagcaaaatgattcgtcatcgaagactaaatagtatatcataggatcttgtaaattcaaaagggttttcatttttgaattaggatgtaaccgaagttgatgaacttgttttataaggtctaagttgtttgttcctttcacttcctgcagataactttttttcgaatcttcttgcattatgtgtatcttttgcttaatatatacactcgtagattaatggcttggcatctctgtacgcaggtgaaactctctggatcgattagcagccagtacttaactgctttgctcatggcagctcctttagcccttggagacgtcgagatcgagatcattgacaggctcatatcggccccctatgtggagatgactctaaaagtgatggaacgttttggcgttaaggtagagcattccgatagcttggataggttcctcgtcaagtgtggccagaaatacaggtcagtattcaagtgactaaatcacattaacattatcggcatcacatgtgtgcacattctcttctttgtggcaggtctccaggaatagcttatgtcgaaggcgatgcatcgagtgccagttacttcttagctggtgctgcagtcactggcggtatcgtcaccgttgaaggctgtggtaccaccagtcttcaggtatttttattactttgaaactgtacaaaatcctttgtttcttatcgtcgaataaaatgatgtttcatcttgtgttttctgcttagggtgatgtgagatttgctgaagttcttgagaaaatgggagcaaaagttacatggactgaggacagtgttacggttactggtccaccacgcgatccttcaaagagagggaacttacggggaatcgatgttaacatgaataaaataccggatgtcgctatgacgcttgcagttgttgcattgtttgccgatggccctacggctataagagatggttagttatcgaaagaaaaattagctgcaaaagcactaaagaatatcgaattcaataccaaattgcacacggtgtttgataaccaactatctcaatctacttctgtttagggtctatttgatttgagagacttgagaattaacttctgtagttggtactacaatctaaatggtgtaatgcgaactgcggcagttgaaagttttttaacatacaagacggattccgtgacttataactcaactacatcaaactaaacaagcgatacaaaattacttcatttaactactccagttcaactttaactacatcaaactaaatagcctcctagcagcacaaaaactctaatcaacgttgcagcgttcacagaacaagaaagtgccaacactcacacttatatacgatatgcagaatcttttttattcgaaatatcttctttattaacttgttttctctatttttagtggcttcttggagagttaaggagacggagaggatgatagccatttgcacagagctccgaaaggtcggtaatgttcattctcttgtaacttagctctcggttttcacattctgatttttctattgtattatgttttggttcagctcggtgctacagttgaagaagggccagattattgcattatccatccacctgaaaagctgaacgtaacggctatcaacacatacgacgatcaccggatggcaatggcattctctattgctgcctgcgccgacatccccgttgcaatcaaagaccctggttgtactcgcaagacttttccggactattttgatgttctgcatagtcttgccaagtactgaacgaaacctacgaaagttaatttagtcgacttggttggtgaatcagttttcatgtaaaattgtgtaattcgtgtattaataatctttttcatacaaaataaacacggcaaaattttctttagcaacaattgagttgatcaaaacacagcacaattattttggtacaaaaatattttcatatattaacataactaaccaactaactagtttgtctagaaaataaaagctaagaaacaaaaatcataacaacaaatcagtaggcagtttataactgaaataactgccctctagtttaaacacaacaaagccctttccttccctccaaaactaaaacttcgaccgattctccgaaaattccttctctcccacccccatttcctcccatcttctaggactccaaagtcatctttcccctctccaccacagctgaaccttggtcagtacagccctggagattgagggataatactgtcagtgctatcgttcgatgttgggacaatatcgagtgcctaaagtcttctgttccttttatgcagcaacacctcaaagaattccgggtcccattttcctttccttcccctttggagtttgttggtgattgttgtttttgtttgtttggtggtaggaaatgatggagagttatggggtaaagttggagagatgttgtgaggaaattgaaatgaagagggtggagatggagaccgaggatgtcgagcgaaagaaattggaggaggagagatcattgacgctcctgtgggattttgggcctagcgtggactagttgtagacgggtggtttgtcgagatttctcctgtagagcgtcctcggactttctctagatttctttgtgggttctcaaggagggtcccccataaggtttgggccactaggatgatgtcaacatgtgcgctaggtgaacctaagttcgttatgactttgcgtgcgtcatatgatccgtactggacgaacatgagaaaggagtgagacacatgccccttgcttagtgccagttgtactttttgtaggatttgggaatggctcccaactcttgagtcattagtgtggtatttgtgccattaatgcatggatcttcgggggtgagccctaaagacgaggtcctacgatcgtgggtgttggggatttagccatcctaagcatggggctcctggatctctgaggacatttgtcacggggccgttggatccccagacatatcatgacactcttacaagtgtctgagcctgactgttcttggaatcgctgggtcccaagacggattagtcattatcctctataggcccgtcttgaaaaatgttgaggccttgtgccaaattaaaaatagggctttaactaaataaaataaataaattttaatttttcgaatacattagtctcttccttaaaacaacaaaaactattaacaaaataaaaaaatcaatacaatacattaaaatgaagctatgaaacaatcggagcaatcacgaaataccaacataacagtctaaaatagcaaaaattagtatataactcttaaaaaattacacaaattatatagctatacttaaaaaataaataattaaaaaataaatttctaataagtggaggatatggattgggcacccttaaagtggaggccctgtgctgtagggctaatagaaccccccacagagaccccttatcctctagtttgtctttgatttttactcttgttgtcaatatagaagaacaaaagagaataatctagtgtgctttttcttgttgttgtggttaattttattgtttttgatatggaagaatgcaataacactattgtgtttcttgttgttgtcgtcgtcaaaattcttctcattgttcttagtgttgacagatggtatttggtaatatttatgaattttttttgttgaagtaatataatccaatgttctttttgttcatgttagattcaacgaatgatctagtgcctatgttagcattgtgttgatgtctaggaatgaaatgttgttatcgtctagtattgattatgatttgttatcaatatgctgaatgaatttgattattgatataatgtttggcattacgcattttcaaagtgcgaggattaagtatgatttgtcgagacgtaggaagcaatccctataagagattattgctttctataaatgataggtattgttaactcttcctgatgttttctctcatttctctaaaaatgtagatttgattcatatgttagaattagtgatggtcatagggcgggttggggtgggtaggcactcccccgcgacccgccctgctaaatacatatccgccccgaaactcagctcgctttgggttttaaaaacatgactcatgacccgtcccacaacggaatgggtcgaccagcgggtcgccctgttcaccaagttatttataaaaaaaaatatatgcatacttatataaaatattataggcttatgtgcatgtatttaattctatacattttaaattataattaaagtttgtagttaaatctattaaaattttattttttaaactataaagtactaaactataatattaaacttataaaaaaatagatatattatactataaatatgcggggcgggtacgcgtggcaggaataaccatgacctgtgacccgctccgtcccgttgcgggtcaaaaataaccgccccactacccaccccacaacccgtttagttaacctgtttataatccattcgggtcgaaaaccctataggacgagtaattttttgccccatgaccatccctagctagttagaacaatgtgtagttagagtaggatctcagcaaggaacggagactcttttcacacatttttaaaaagtaatgatggaaaactagataaagatctcatactctttttgcgaattcacaaaaagtaataaactaaactcatagcaacaattattatcttacatatagataattcctcgtatcttgttcattcgcaataaattattttagttttaaagatacatgcaactagagtcacatgtattcgacatatttataaccaacgatttttcgttctgaattatcacttttgtaagatacatttgtcaacaatgttgtacaaaatcgttatattgatctatatgcacttgtaagtacacaacatggactaacatatgcatgtatattataaatatcaacttgtacatatatgatatggttgaacgtatatgcactatacttttatggcatgaaactccttgttctttgggacatgcacatcttgtcttttattttcttaatatatatacttttcttttcttaagaaaaaaaataaatctagagcttgttgtggtatacatttgcgttctctgtctttcttaaatatctactatactaacgatctattgcttgcttagtgcggcaaaaggaaccttttttttttcttaatatatactaaaatttttacttctcttcttaaataaataaataataataaaaaacttgttgctacatacatttgcaccctacctttcttcaatatcagttacactttctactcttttactaaatagctaggaaaaaaaaatctacggcacaaaggacaattcttacctttcacaaggaaaaaaaaaaaataaaaaaaaatcatgttatttaaaagacactttcaagtttgggtacaaatggcgtcaacctcgaacattgtttgaatcagaatcgtttcaattatatgttcctagtccctagagtaagaagtcactttttgcttagcacgtgagactatcttacaagtggactaccccaacactccacatccccctccacctccgccatcgccttctgtgcctgtctcttcgcctcccttgccaaccccgtggcctcctcgaccgaaaccgcgcgagtagcggctgcgagcattaagttagctttgttggcattgcccgcagctctctgaaaactatattccatcatggaggcgcaaagttccatctcggctttttcttctatgtattgggagtgttgaaactcctcctttgcagaggttgcttcggctttgtaactaggtagtttgggctcgtaaagtgctttggcttcccgtagacgagactccgcttttgcgatatagagagaagcctcttgtagttgcatttttaaggcttttcttgggtttgtctttgcgaggatggagatgtaggattttgtgagacagtgaggaagttttgcccaccatggctttgctattgtgctcggcattggtttattattgattgattatctttaatcaatcaatataatatatt

SEQ ID NO: 86 - DNA, 6205 bp, Commelina diffusa
atatattaagcgaagacgtttttgatacttcttatcgcgccgcctaagcgcaacttcatcaatcaaatatatatattattaaactcaattcctaatatatctctaaatcctatttgtgtatttctagttgcggagttgtatttgtacactgagtttgcagtatacttttgtattttccatctctgacttctaatcggagactgagtggtcagctaggaagtaatcatcatcaattacaaatatcacatgcaatgttttttgaaaaaattcttgacaaacattttcttttagggggttaataatctgtaaaatctcatagataactcttcggtgttgttttataatatgatgatactcaaggtggtcataatctgaggtgctaagtaggatcggcaaagggtccagagaattgaaatcatggagctagataaggatcgtaaaattctacaaaaataataaaatatagtataaataaattataaagaatattttatatgtaaaaataatgtaaatatgtacacaatattttttgtaaatttatatataagcaatttcaacataaggattaatatttacatgacaaaattatcgaatttaataatataacacaataaaagtaaaattgtgagtccttaattaattaacttaagcattcttataaatgtagatactttgttttgaaatttatgttgtttaaattatctaatataatagatattttcaaaataatttttgttcatgtcatgcatataaatatttttatattttttaaaaaaagaattcatgcacaaaatagtctaataaattattattttcaatattatggtgagcatattttcttttgagttattgtggatttgtggtgagcaaattattattaattagtttcaaattttaaaatataatatgtatatgacatctattgcaactaaacatgattttataaattaatacaaataattttaggttaattattattgacatcttaataatttaatatattgttaaaataatttaattttataatatatatttttaatattgtgaaaaagtttttgtcatctctttttgaattatagattttttaattacatatatacatttttaattatctatcagtatatacgcaataaatatcgatatatttattttcatatctataaaatgcatatcataattatttatagcaaaaatgattttaaaaatgaatatacaattatcctataaatattttagaaatttttagcacacaataatatatttaataaaatttatcatcatatattaaataaaataattactatattatatgaaaatgcaaataataatatttaaaaatctctcatgtaataggaaaataatatctattatgttaatcgaaatttagacagtgaagtatatctaaccatttataatggtaatttacttagttatatgattatatagttttttaatactaagaaacgtatataaaaccctatgaagcataaacatgatttgaatcgatggggtccccccatcttgtttgtttgtttttttttttccaatcattgtttttatatcctaatattcttgatttttttttttccaaatatactctattagtttttccatccaaaatgctgtcatcacattattttattaatattttatcaataaaatattgatataaataaatgaaataaaaacactttattttttatttattaaaataatcatttaaattgtttcttactaaaaccaaataattcttataaagtatacatgataaaaagaactaaagtataaatatttaaaaataaaaatataaaagatatttgaagttgtatatgtatcacaattgtataaatattttatgaaattatattttaaaaccaatattttaatataataatattttattaaaaaatacaataattttataagcataataataataataatatttttttttttcttcacatttctctattcattgtaataatgtataattaatatattgtttttagatgatactatgggttggtattattttaattttaattttttttttgaataaaactaggtgcatctagtgtgttatttcattcaaaaatatgtaatcatgattacactaatcttgaagactatctcgtgaagagagaaccccacatgataatcccccaaaagaaaattatatacaaaaatgtgtaataaaaaatatgttattttaaattttttgaaaaaggaaaagtataattaacttaatatgcaaaataatttttgtatacaatagatggttattatcgtttaaatacatatggagtataatgtccatgtgaagcatgggccatgtgctagtttgctaaaaatataaatattttgctttagttttaactatttaattcattttatttattacattactatttaaattgtattattgttttaaattaattgaacatcgtataacttttttgagttcaagaaaattataaagaacaacttaaaaacacaattttttaaattaatcttttataataagaccattttaaatttatactattatgtaaaatagaggattccctaaatttaatatattatttatttaataaataatttacatagaaacttataaatagaccttaaaatttatttattatatatatatgtatatatataatcagttcctatgattcctaaaaatttattacattcaacagtattatatttttgatattttttttatttttcctagatcaaaagtatatttttttaacttacataaattttcttaagatagtttccctttatttgaatcctaataaaatattttttctgattaatttattaataaagatgattaaaaatatttgattatgatccttttttttccttgatcaaaagtatggtttttttttttttttaactatagaattttaagataattttcctttatttgaatcctgatataatttttctaattaatttattaataaatatgattaaaaatatttgattatggtgcaaatttaaaattttaggccaataaaaaatattttaattaaataatgatatatttatatttggtataagatatttttttgtataaaatattttttttacaaaattaaatattttctattttatattaatttattctttatttttttaaatgtatttttattcttttattgttgaataagagttataactttattgaacaacttatatgatttcaaaagtatacatattattcaaccttttgggattcacatgcccaatctcccatgctattttgcgatgtaaatatttgccgcttaaggtacgcatttttgtttgacttctctccacaacacatattgctacgagggatcaacttagaatagacatgcatgttgactcacactatgcattctgcggagccgataattcggcggatcatcttttcctcttgtatcctatcggaagcttgttttgatttacatgttactcctattcgtgctcgaccacaattcaagaggtgtggattagtggacgtcggtgtcaacgtgtcgcctggtcggcattctgctggactctttggaaggcacggaaccgcctcatctttgaccgttatcctcctaagttgcgagctattcagtgggtggttcactatctttttgtggattggacgttgaccatttactgttttaggttggtcttgctttgttcgctctgtagataattattctgctttctttttagagcctgtgcaccaaacctctttttgcaatgaaatgctaggtctcctagttttcaaaaaaaaaaagtatatatattttaaataaaattaaataaaaatattttcttgacattaaaatattaatttttaatagtaatataatgtgatagatttataaaaatgttttaaatttactaaatagagaaacttgttaaatatttttgggtcataaaaatttaaaataaaataattataaaaacataattatgttaaattgtttttttaaatattattatattaaatacgatatataataatgtcataaagttataccatcacatatacactaatatttcaataaaaaaatatgtgtatgatttttttttccttcataatttcttttacagtgatatttttaataaaagtaattaaataacaagtttgagaggtatgatgagctcctgagacaatattatattttctatattttcaatttgtatatatatgtttttattttatttttttgaaattataaacatagaatcttattatttttaatcattcaataaattctaagtggtttatatttagttcactttttacttatcatattattgttaggttgctttctttctttatgatagcaatttttttaattttttttttatattaatggtaagatatgttaaaattaacacttcatatatatataatatatatattagaaaaaattaacacttcatattgactcttcatgtgttgattgattactatccaatacttgcaatcttaacgctattgttaaaaatcgtaacggaactatgaagctttgaaccaaactacctcctcagagaaagattgatacaattccggtggtttacttttttattaaattataacattgtaagatgacttgctaattacatacattacatacaattataacataaatatagtgaataataatagaaactaaataaccaactaggtaatagcctagttgggatttcgtctccaaaagagatggaggggccaggttttgagccatggtgactgcgcttgtcgcaaattttccaaagaaaaagagcataaatgccatagaattatgacataaactacaatttttaataattcgaacaacagtacttaataatatgccataatattatgacacaaattacagcaattaataattcgaacaactacaaactgcagtacttaataattcgaataaccacaatacttaataattcgaacaaaacaacataattatattaatgcatcacgtgtttgcatgaaattatgacatcatatatatatacactaattcttaaccttacaatttttattttttttttgaattatgacataaactattatatacactaattcttaaccttaaaaaaaaactatgacaacatgtatatatatatgctaattcttaaccttacaaaaataaataaatcttgaattatgacataaactatagtacttaataatttgaacaaaacaacataattacattaatacatcacatgcttgcatgcaattatgacatatatatatacatacacacacaaacacactaattcttaaccttaaaaaaaataaaaaatcttgatctattgaaagcaacaaaatagcatattaactttggtatagtacacaaaattatgacataaaatattaactttgctgtaaggcttttaaaaaataacttctctatcccaatttaataataatgataatgataatgataatgataataataataataataataatagtaggagcagcagcaggattagatctagattcttttatgacttcaccatacagtgattttacattatgaataataggatttgattctcttaacttaataataatattaataagaattagatctagattcttttatgacttcaccgtacagtgatttgattttacattatgaataataggattagattctcttaactataataataataataatatatttggtaatgcgactttatagaaaggacccgaatttaattcggagttccgtatagttaaactgtgtctctcactaatagtaaatatatatatatttgcattctcactggtctctcaaacatcaatggccaaaacccaacacttccactcatcctcgccggcggcgatggccggagcatcccctgaggtcgttctccagcccattcggcagatatccgggacggcgaagctccccggatcgaagtctctgtcgcagaggatactgctccttgctgcgctctctgaggtgaggattgttcgttttatggtaaaaatgaattcttagtagttttgctaatgtaattgagctgcattgatatgaatgcatatacttggtaacctagtgttagttttccaagaatgttggagatagtttgactttttttttaatacagaaattttattatattattatataagggtgttactactactactactacttctactactactactact

SEQ ID NO: 87 - DNA, 818 bp, Commelina diffusa
  unsure (1)..(818): unsure at all n locations
cttaaaagcctaaaatccacctaactttttcagccaacaaacaacgccaaattcagaggaagaataatggctcaagctactaccatcaacaatggtgtccatactggtcaattgcaccatactttacccaaaacccagttacccaaatcttcaaaaactcttaatttnnnnnnnnnnnnnnnnnnnnnnnnnnnnggatcaaacttgagaatttctccaaagttcatgtctttaaccaataaaagagttggtgggcaatcatcaattgttcccaagattcaagcttctgttgctgctgcagctgagaaaccttcatctgtcccagaaattgtgttacaacccatcaaagagatctctggtactgttcaattgcctgggtcaaagtctttatccaatcgaatccttcttttagctgctttgtctgaggtatttatttctcaactgcgaaaacaatctctatttgatattggaatttatattacatactccatcttgttgtaattgcattagtacatacttatgttttgacctttgttcgtttgtttgttgaattggtagtgttgagaatttgaatctaattatttgtttttccatgtgaatttaatctgattaaatccacttcttatttatgttaagttgcaatgatgtttgccaaacggttatcattgaaggataagttcgcctacttttgaccctcccaacttcgcgttggtagagccattttatgttattgggggaaagtagaaagatttatttgttttgccattcgaaatagtagcgttcgtgattctgatttgggtgtctttatagatatgata

SEQ ID NO: 88 - DNA, 127 bp, Commelina diffusa
tgattaatttgatgtatatatatagttgaagagttgtacttgtacgctgagtatgtatgtagtatatttgtactcggagactagctaagttaccatgtaattaattatccatcatcaattacaaaaa

SEQ ID NO: 89 - DNA, 783 bp, Digitaria sanguinalis
attaattcttcgtctttttgtctgcaaatcaccaagaaacataatggcagttcacattaacaacatatccaactttacttccaatctcaccaatacccacaatcccaaacccttccccaaatcattaccatcatcttttggatccaagttcaagaaccccatgaatcttgcttctgtttcttgcaaccaaaactttcaaaaagatcactttctgttacagcttctgttgccaccacagagaagtcctcagtggaggagattgtgttgaagcccattaaagagatttctggaactgttaatttacctggatctaagtctctgtctaatcggatccttcttttagctgctcttgctgaggggactactgttgtagacaacttattgaacagtgacgatgttcattatatgcttggggcattgagagctctagggttgaatgttgaggaaaatggtcagattaaaagagcaactgtggaagggtgtggtggtgtgtttccggtgggtaaagaagctaaggatgaaatcaaactatttcttggaaatgcaggaactgctatgcgtccgttgactgctgcagttactgctgctggtggaaattcaagctacatactagatggtgttccccgaatgagagagagaccaattggtgatttagtcacaggtcttaaacaactcggtgcagatgttgattgcttccttggtacaaattgcccacctgttcgtgtagctgccaatggaggccttcctggtggaaaggtcaaactgtcgggatctattagtagt

SEQ ID NO: 90 - DNA, 679 bp, Digitaria sanguinalis
ggattggagggctacctggcggcaaggttaagctgtctggttcaatcagcagtcaatacttgagtgccttgctgatggctgctcctttagctcttggggatgtggagattgagatcattgataaactaatctccattccctatgtcgaaatgacattgagattgatggagcgttttggcgtgaaagcagagcactctgatagctgggacaggttctacatcaagggaggtcaaaaatacaagtcccctaaaaatgcatatgtggaaggagatgcctcaagtgctagctatttcttggctggtgctgcaattactggagggactgtgacagttgaagggtgtggcaccaccagtttgcagggtgatgtgaaatttgctgaggttctggagatgatgggagcgaaggttacatggactgagacaagtgtaactgttactggtccaccgcgggagccatttgggaggaaacacctaaaacccattgacgtcaacatgaacaaaatgcctgatgtcgcaatgactcttgctgtggttgccctctttgctgatggcccaaccgcaatcagagatgtggcttcctggagagtgaaggagactgagaggatggttgcaatccggactgagctaactaagcttggagcatcagttgaggaaggtccagattactgcatcatcacgcc

SEQ ID NO: 91 - DNA, 638 bp, Digitaria sanguinalis
tgtagagggtgatgcttcaagtgcaagttacttcttggctggagctgctataactggtggcactatcactgttgaaggttgtggaacaagtagtttgcagggtgatgtgaaatttgcggaggttcttggacaaatgggggctgaagtaacatggaccgaaaactctgttacagtgaggggtccaccgaggggttcttctggaagtaaacatttgcgtgctgtagatgttaacatgaacaaaatgcccgatgttgccatgactcttgccgtggttgctctctatgcagatggtcctacagccattagagatgttgctagctggagagtcaaagaaaccgaaaggatgattgccatttgcacagaactcagaaagttgggagcgacagttgaagaagggcctgactactgtgtgatcactccacctgagcggttgaatgtggcagcaatagacacatatgatgatcacaggatggccatggctttctcccttgccgcttgtgcagatgttcctgtcaccatcaaggatcctgcttgcactcgtaagacgtttcccgattactttgaagttcttcagagattcaccaagcattgatgttttcaatagagtttttgtttcatttgtaaggtgccaaatatgt

SEQ ID NO: 92 - DNA, 605 bp, Digitaria sanguinalis
cttagctggtgctgccatcaccggtggcaccgttacggtggaaggttgtgggacaagtagtttacagggggatgtaaagtttgctgaggtccttggacatatgggcgcagaagtaacctggacagagaactcagtgacagtgaagggcccaccaagaaacgcttccggaagggggcacttgcgtccagtcgatgttaacatgaacaaaatgcccgatgttgccatgactcttgccgtggttgctctctatgcagatggtcctacagccattagagatgttgctagctggagagtcaaagaaaccgaaaggatgattgccatttgcacagaactcagaaagttgggagcgacagttgaagaagggcctgactactgtgtgatcactccacctgagcggttgaatgtggcagcaatagacacatatgatgatcacaggatggccatggctttctcccttgccgcttgtgcagatgttcctgtcaccatcaaggatcctgcttgcactcgtaagacgtttcccgattactttgaagttcttcagagattcaccaagcattgatgttttcaatagagtttttgtttcatttgtaaggtgccaaatatgt

SEQ ID NO: 93 - DNA, 605 bp, Digitaria sanguinalis
cttagctggtgctgccatcaccggtggcaccgttacggtggaaggttgtgggacaagtagtttacagggggatgtaaagtttgctgaggtccttggacatatgggcgcagaagtaacctggacagagaactcagtgacagtgaagggcccaccaagaaacgcttccggaagggggcacttgcgtccagtcgatgttaacatgaacaaaatgcccgatgttgccatgactcttgccgtcgttgctctctatgcagatggtcctacagccattagagatgttgctagctggagagtcaaagaaaccgaaaggatgattgccatttgcacagaactcagaaagttgggagcgacagttgaagaagggcctgactactgtgtgatcactccacctgagcggttgaatgtggcagcaatagacacatatgatgatcacaggatggccatggctttctcccttgccgcttgtgcagatgttcctgtcaccatcaaggatcctgcttgcactcgtaagacgtttcccgattactttgaagttcttcagagattcaccaagcattgatgttttcaatagagtttttgtttcatttgtaaggtgccaaatatgt

SEQ ID NO: 94 - DNA, 510 bp, Digitaria sanguinalis
tgtagagggtgatgcttcaagtgcaagttacttcttggctggagctgctataactggtggcactatcactgttgaaggttgtggaacaagtagtttgcagggtgatgtgaaatttgcggaggttcttggacaaatgggggctgaagtaacatggaccgaaaactctgttacagtgaggggtccaccgaggggttcttctggaagtaaacatttgcgtgctgtagatgttaacatgaacaaaatgcccgatgttgccatgactcttgccgtcgttgctctctatgcagatggtcctacagccattagagatgttgctagctggagagtcaaagaaaccgaaaggatgattgccatttgcacagaactcagaaagttgggagcaactgtcgaagaagggccagattattgtgttatcactccgccagagaagttgaacgtgacagccatcgacacatatgatgatcacagaatggccatggcattctcccttgctgcatgcgcagacgttcc

SEQ ID NO: 95 - DNA, 510 bp, Digitaria sanguinalis
tgtagagggtgatgcttcaagtgcaagttacttcttggctggagctgctataactggtggcactatcactgttgaaggttgtggaacaagtagtttgcagggtgatgtgaaatttgcggaggttcttggacaaatgggggctgaagtaacatggaccgaaaactctgttacagtgaggggtccaccgaggggttcttctggaagtaaacatttgcgtgctgtagatgttaacatgaacaaaatgcccgatgttgccatgactcttgccgtggttgctctctatgcagatggtcctacagccattagagatgttgctagctggagagtcaaagaaaccgaaaggatgattgccatttgcacagaactcagaaagttgggagcaactgtcgaagaagggccagattattgtgttatcactccgccagagaagttgaacgtgacagccatcgacacatatgatgatcacagaatggccatggcattctcccttgctgcatgcgcagacgttcc

SEQ ID NO: 96 - DNA, 477 bp, Digitaria sanguinalis
cttagctggtgctgccatcaccggtggcaccgttacggtggaaggttgtgggacaagtagtttacagggggatgtaaagtttgctgaggtccttggacatatgggcgcagaagtaacctggacagagaactcagtgacagtgaagggcccaccaagaaacgcttccggaagggggcacttgcgtccagtcgatgttaacatgaacaaaatgcccgatgttgccatgactcttgccgtcgttgctctctatgcagatggtcctacagccattagagatgttgctagctggagagtcaaagaaaccgaaaggatgattgccatttgcacagaactcagaaagttgggagcaactgtcgaagaagggccagattattgtgttatcactccgccagagaagttgaacgtgacagccatcgacacatatgatgatcacagaatggccatggcattctcccttgctgcatgcgcagacgttcc

SEQ ID NO: 97 - DNA, 1548 bp, Kochia scoparia
atggctcaagctaccacctttaacaatggtgtcaaaaatggtcatcaattatgcgccaatttaccaaaaacccacttgcccaaatctcaaaaagctgtcaaatttggatcaaacttgagattttctccaaagttgaagtctttcaacaatgaaagagtttctgggaaatcatcagttgtttttaaggttcatgcttcagttgctgctgctccctcaacttccccagaaattgtgttgcaacccattaaggagatttctggcactgttcaattgcctggttctaagtctttatctaatcgaattcttcttttagctgctctttctgagggtacaacagtacttgacaacttgctatatagtgatgatattcgctatatgttggatgctctaagaactcttgggctcaacgtagaggatgataataaggccaaaagggcaatcgtggagggttgtggcggtctatttcctgctggtaaagagaataggagtgagattgaacttttccttggaaacgcgggaacggcaatgcgcccattgacagctgcagttgccgttgctggaggaaattccagttatgtacttgatggagtgccaagaatgagggagcgacccattggggatctggtagctggtctgaagcaactgggtgcagatgttgactgttttcttggcacaaattgtcctcctgtaagagtaaatgctaaaggaggtcttccagggggcaaggtcaagctctcaggatcagttagtagccaatatcttactgcgctactcatggctacccctttggctcttggagatgtggaggttgaaatcattgataaattgatttctgtcccttacgtagagatgacaataaagttaatggaacggtttggagtgtcaatagagcatactgctagctgggacaggtttttgatccgaggtggtcagaagtacaaatctcctggaaatgcatttgttgagggtgatgcttcaagtgccagttacttcttagcaggggccgcgatcactggtgggactgtgactgttgagggttgtggaacaagcagtttgcagggtgatgttaaattcgcggaggttcttgagaagatgggttgcaaagttacatggacagagaccagtgtcactgtaactggaccgcccagggactcatctggaagaaaacatttgcgtgccatcgatgttaacatgaacaaaatgccagatgttgcgatgactcttgctgttgttgccctatatgcagatgggcccacagctatcagagacgttgctagctggagagtgaaggaaacagaaaggatgattgccatctgtacagaactcagaaagcttggagcaacagttgaggaaggacctgattactgtgtgatcactccaccagaaaaactaaacgtaaccgccatcgacacatatgatgatcatcgaatggccatggcattctctcttgctgcctgtgctgatgttcctgtcactattaaggacccaggctgcacccgcaagaccttcccagactactttgacgtcttggaacggtttgccaagcat

SEQ ID NO: 98 - DNA, 7037 bp, Kochia scoparia
ttttcatgaaataaatcttgatccttcattcaaaatccaacgatcaaaattgcttctcacgtttctcattttaagggtgcttctcatttgatcctaaatctatatacatatgtaagtaccttgaatgccatggaattgaaattttaaattatgtgttggttgtgaatggggttaatgaagtagatagagtaggctgacaaatattccaaggggtacctacagctactcttggtcactaagtcattgttctgtttttagattttaattgctttcccttatggttttttcagttatgtacttgatggagtgccaagaatgagggagcgacccattggggatctggtagctggtctgaagcaactgggtgcagatgttgactgttttcttggcacaaattgtcctcctgtaagagtaaatgctaaaggaggtcttccagggggcaaggtagagtaaatttcttgtagattaactttgttgataattcactcattaatatatcaatgagacatcctcaaaaaataactctgtcctgttttcctgtcattaagctctgttacataacttacattattttaaagcattttgatggaatgtatctgcaggtcaagctctcaggatcagttagtagccaatatcttactgcgctactcatggctacccctttggctcttggagatgtggaggttgaaatcattgataaattgatttctgtcccttacgtagagatgacaataaagttaatggaacggtttggagtgtcaatagagcatactgctagctgggacaggtttttgatccgaggtggtcagaagtacaagtaagtcactcttcttttacttgcatgtattgaacgtcattccattggtagactgatgcagcattaataatatgtcagatctcctggaaatgcatttgttgagggtgatgcttcaagtgccagttacttcttagcaggggccgcgatcactggtgggactgtgactgttgagggttgtggaacaagcagtttgcaggtatgatccaaagcctcacttcaataaattttcaagtacacattcgttttacttcctccgttttgtattactcgcaccggtttccattttgggaaatttgcgaatacttgcaccactttgctttattcccttttttggcaatttattttgtttgaaatgaccattttagccttattgtttttccccacatggtgggatcaaaggaattaacaccataaaacacacctcctttataccccaccaacttaatcacactacccttccctcaactaattataccaacaaaaaaacgccttggagtccgcaataatgaaagtggtgcgagtaatataaaacggaggaagtatttattttttagattaactgttgtaaccattttttggttaattttgaggctaaagtatggccttttgacaattaactttcaatattaatctctaatgtggtgtaaagtcatccattttaatatcagacaattgtgtttgactcccaaaaaaggataatttacttcttattgttttgtgactgccaaaaaggatcacttgaatgtcatggattgtttaatcacctatttaggcattgttgtgttgtgattcacctcatctttaggtccaatagattttggctgaatcttacttgtgactgccaaaaaggatcactgacaatttacttgtttaacggattttactcagggtgatgttaaattcgcggaggttcttgagaagatgggttgcaaagttacatggacagagaccagtgtcactgtaactggaccgcccagggactcatctggaagaaaacatttgcgtgccatcgatgttaacatgaacaaaatgccagatgttgcgatgactcttgctgttgttgccctatatgcagatgggcccacagctatcagagacggtattaactcctttctgatacattacacttttcttgtgctatatattgtttcaaatttgataattcgatcatgcttcaaattttgcacacagccgtaatccatggttataaaatgactatgacacttgtcttgttactgaaaagtgcatacagtaacaaagctgatgttacttcttagtttactctaataatggttggacggtcactggcgcacatccccatggttggaagttgtgaatattgttgtcataatggcttatggagcatcttttggtacacttcaggagtaaaagaccactagtccagtatagggttaatcacctctagaactagttagtcacatatactcggaaaattattcatattttgtggttacatgcgttcgtttatctgcatcttgcctagtgtctcctcttgaaatcattcatatatgttcttttttttccccttcatctgttacatgttcaaaatatgcttacaacgaaattgggtaacttgaccagttgctagctggagagtgaaggaaacagaaaggatgattgccatctgtacagaactcagaaaggttagccacattctttaatcttgtagtaaaaaataaagttgcctgtttcatgtaagttgatgttaattcggacttttaaaattttcagcttggagcaacagttgaggaaggacctgattactgtgtgatcactccaccagaaaaactaaacgtaaccgccatcgacacatatgatgatcatcgaatggccatggcattctctcttgctgcctgtgctgatgttcctgtcactattaaggacccaggctgcacccgcaagaccttcccagactactttgacgtcttggaacggtttgccaagcattgagcggctatctgcagatttttcataaagtatgcacgaaagtttcaatttaagaagataccgagttgattatatgctttccgcataagttattgtcacattttttgtattatgtttgtaagatcttaggcaataagatatactgttagaaattatgtgtatctgattatttagagatgtatacttgggtcagttgaaattgtacgagaaaggtctggatttcgaaaaaaatgtgatccagacattagtgtggtctgaactgaagcaagtactccctccgtctcataattctcacaactcttgctattatttgtgagaaataaaatattcaagtgttgcgagaattgtgtgacagcgggagtagcaacttttcaagtttggaattaattttgtgatgtgagttttttgtgtattctttgttttccatcaaaccctcctccaaagtacaaacccaattcatggtatggttgatgcaacagcaatatgtcaaaatcagtgtttgtgatgttggcttctctacttcattatctcttcttgttcagtatgatttcgcaatctcttcccgtcaaaatcccttctctgataaacgcggaaatcgtgtcttcccctcagtgtgtatccacctcttaaaaatttgttgagagttgaaatgtgctgccactggattcatcctttagggcgaattttgaacggattttaggtggttaggattcaatccctgtcaattattgttacgggaattagacacgcgttctgccttaccaaccccattttttttgtcactatatcaagtatccattgctagttgtagtcatgtagtagggtctgaaatctaaagctaagtagcaagattgcaacaacaggaacagcaaataaatctagacttttgaggtttgttttttttttttttttttttgacttttgagcttagtttgtcatattggttaaataataagttactgtaaatagattcagttttaattttgttgttagtgttagtgtgtttggcggtggttggtggtttatctatcttttccattactagtgtcataattcagagaagatctactttgttgatgataatctgtgtagtattgaatcagacatcaaatcaattcgtagaatttgttgaatctagtattagcaaggtccccttgtagacggctgcagatgacagcgattcatgagacgagagtattttttaatgtcagattttacaagcgattatagtgatgttgaattagaattattattaggttcaattttcattatctttgttattttttttatctctgttgtaaatgtcgtatgacttgttattttttatctctgtcgtaaatagttacttttcccctagaaaaaagtcagaactgacatacgactaccacttcagttcgtaatttataattataattattattattctcccttgttttactttagacaaaaacagtaattgcaaataataatttatcatgaatcatgatgaaaaattgaaaatggaatagaagaagtgaagaactgccttagtttaaaaaaaaacgaagattagatagaattacactgaaggtaagaatatagtgagagtctaattagtggttaattaactatctaggcttaattctcaatcacttttttaaaaacttgtgctatcacttttgcccttcaattagggttcattagtggggttaaataatgcacaatagggtttgcattatatgacaacattagagtgagggataactcaagtggttaaaactcttctctcgatttcagaatattctgagatcgattctcatttccattctagtggctctcttaacaccaaaaaaaaataaaaaataaaaaattagtggggttaaataatgcacaatagggtttgcattatatgacaacattaacttgttaactaaacgaacacatacatgtgtaaataaaacgataagaaagttgttctatacttattcaaaggtctcgagttcgagccctgagaatgaagaagcatgtgttaaaagaactaatttcacaattgtgacttaactcgattcgaatccaaattaatcaaatcctaacggatttcgaatattgaatacgcttgtgtaaaacataacatttatgaacttgttaagtagtttaatggagtagttaataatcctttataacataggtattattaaagtgataaagtaaacaagattgtaagacgacaataagaccaatcaaagttggggtcaaatgattgaataaaatgaaataatttttttaaaaaaaatagagaaaagattatgtgataatataattacaaattattacattatcaccgccaaaacttattgtagcatgtgagaatgtgattattaaattaaaaaaaggcaaagttggaagttaaacatgtcatctttcttcctttgtagtctgccctaagcttaaccatgttgtctcccctttttaaaaaaataaattaaaagttgcattattgattattaagtttacaaattatatcctatgataaattgctaattgaaccatacctaataagcctaagctattagatctatcacttatatatatagttgcacacattcgtaccccttaggtccttactaaatcaatttcgatctcggtcatttaatattgctaacaactatctgtataagaatctattaaaatgtataagctcgatatttttcaaatgaaaacaaatacttcgtaattcatttttgttcggttatctttaattgtccacaaggtggataataattagcttggtagtgcaataataaacaagaataatactagctagtgcaataataatacaaatgtgaagattatcaataataaacacaattaattgtaattaactcaagattaggtgaattttatgatgaggagtgtagagtaaagaatgtggggacataacataagattattaaagtagattatcctataaccttttctccacatctctacttatctcttagtattaaattagaaagacttgaagcttaagaatcaaggtaatatacatggtatatctagcttgtttgttgaagcaattttgtagggcacttcaactttattttttttattttttttaattaaatagtgacaatatatttaattttgatcatttttatttatcttgtatgctagtaaattaaagaattaaaccttggtgtcaggaataaataaataaataatactgactttcgattaacggaataatagagaaagttacataggagatcgaattcaattcacttgtttaaatcttacctatagtttataccatgtatgtttttactacttcataaataaaatttaggacatgtttggcaattgatttaatactaacgatttttttttattttttttatgacatttcgtcatcaatttgaaaaggtgaatatccattatcctaggcaacacactttcgaacagtctacaaataaacgcaaataaatcaaaccagcgaattgcgattgagtgcatatgtatgagatgatgatcaatcatcgcatattactccgaataaagcattgattgatttggaatgaaagatatccaaagaatattgaaggaaagatgctaaattgctatgaatatatatacaatgaagattagcttgtttattatagtattcaggattagcttgtttattatagtattcaggattggaacctaaccacccaaaacggattctcgaatccggattagttcaataggttgaattggatgatacaccaaaaaaaaattataatattcaagagtttgaattagcatgtgcaagtagcgcgatgacacatagtccaaaaataaaaggatctggtccaaaatttactatataacttattacataattaaagataaaatttgtaacatacatatacgggacatatttaaaaattacaccaatctttaaaatccttgtaatatcgtagccacgacattgtttgtattgtagtagcacgtacacctgcccaacataacatcgctattctattgaattgaacacaaaaatgaaaaaaaggacttatttcacattctcacagcattcacataatcacatgtctttgtctcccgttctattgaatttaactccactcctatattaattatttcccatacaataatacaaacaaacaacttacacataaaaatgaataataaaagacagtgagagatcagggctgcctagtcaatccagtggattaacaaaaattgtcaatctaatggcattttggtaaataaa

SEQ ID NO: 99 - DNA, 5741 bp, Kochia scoparia
attttatttacaattttgccatttatttttttcttttttggttttatttaccaaaatgtcactagattgacaacttttatcaatccactggattgactaagaatttttcgtgagcgatagttcggtagatagaaattttcttttgatctcgagaaattttaggatcgattttcatttttgatccacccttgtgactctttaaaaatatatattaaaaaaatgtataataacgcccaccttatttaggaaaacaaagtggatctttttctgttttattttaaaccgtgccctgtatctgtgtgtgtgaccattatttggcctcaattttgaacttctccgagtagttgttaatacttagcatttgggacctgcaatgtttaggttttaggatctgcaatgtccggtggtggggaagcctcattgaatggggaaagatgtactggtaatgtagatggtccttacagtgactcttcaccaaggaatgatacaaaccctaagccttcttgtgatgctaatgttccaactgtattagatggtcaagtcggtggtgcttgtgatgatgtagatgttaatgaaattgttttggaagcagtacctcctgtagtcggaatgagttttaaaagtatgcttgaggttgatgtgttttacaagaagtatgcaaagagtaaggggtttgctgttgtgagggttggtggatcgtctaatgttgctaaagaaagaataaatcagacatggcgttgtgagtgttatggctctcctgatgcgaagattattgccaagtcaaagagatttgctaaggatccagtatcggagaatttaaaggatcaggaactgtgtaatccacgtaggcgcaagtctaaaaaatgtaattgcacagctaagatttatgctagtgttaatgaatgtagacattggattatacgtgaagtagtgcttgatcatttgaatcatgatcccaaacctaaggatgccaaactagtgaaggcatataggatgcaggagtttacttctacggaccgttcaagagttataaatggtgctgcagctggtgggaaggtgggtgttatgtatggttcaatggcgaacgaaaggggtggttatgagaacatgccctttactcaatgtgacatgaggcatgtgcttaatgaagaacgtaggagaaagatgagtggtggtgattttaatgcgttgctagcttattttgggaagttgcagcgtgataattctaacttttatcatgttcaccgagtcgattctgggggaacaatcaaggatgttctgtgggtagatgctcgtagtatggccgcatatgaggagttttctgacgttgtgtgttttgacaccacgtacttgactaatcaatattctttaccttttgcaaatttcattggcgttaaccatcatggtcaaagcatcctttttgggtgtgctctgatttccaatgaagatagcgagacgtttgagtgggtttttagggagtggctgttatgcatgaagggaaaggctccgggtggtatcttaaccgatcaagccgctgcaatgcgacgacccttggagaaagtcatgcctgataccaaacatcgttggtgtatttggcatattaccaagaaactgccctacaagtttggatctcgcaagtggtattatttcgaaccctaatcttccttgtttattcttgtatttgtgttattttgctgtttagtgtctccttgataagtgtcttgtgactccttgatttttttcacttgtgctgaatatcttagtgaaatgcaattgtttaaatcttagtgaaatgcaattcttagtggaatatcttagtgaaatgcaatatcttagtgaaatgcaattcttagtggaatatcttagtgaaatgcaatatcttagtgaaatgcaattctcttaacattcgatcaaattgaaatgcaatttttttgcttgttctggtgttgttgaatgattaattttccggtttatgcttgtgtcgtatctttcataagttgcagcatattatggtaatatgttttaatttgttaatatttccaaacttgcacagttacaaggaatttaagaaggagtggttgaatgttgtttataatagtttgaatgaggcctccttcgaacgccgttggaaggaggttgtgagtaagtatggtttggaaaacgatgagtggttgcagaatctatttgctgagaaacacatgtgggtgccctcgtttatgactgatcatttttgggcgggtatgcgttctacgcaaagggtggagagtataaatagtttttttgaccaatttgttgatcgaaacacgtcctttgctgaatttggagaaaagtacattaatgcggtcgagaagaggattatggaggagaatgaagctgaccataaggaggtgaagttctttaggaattattctactggttttagtgtcgagaggttttttaagaaaatttacacctcaagtatgtttaggtctatacaaaaggagtgtgagaaacgaacctattgtatgattgatgaggtgaagaggttggatgacaaaaattttgagtatttgatggaggatagggtgtggattaaaaagaagaagagatatattgaaatattgactgatgatcgtactcactataccgtgtcttacaattgtgagactaaggatggtatttgtgaatgcaaaaaatttgagactgacggtattatttgtaggcacttgataactctcttttataaggtcaggctagatgatataccagataagtacgttcttaggcgttggaggaaagatgttgtgaggaagcactctagtgtcactgtctcctttcatgatttgagtcgaacagaacaggttaagaggcgtgataggttggtggtggtatttgagcctcttagtcaacttgcttcaaagtcagaagtgtgtactgtaattatgcttaaaggcatggctacaattgagggtgaaattactaaagtgttgtctgaggataaggttgaagaggttaatgaagctgctgctgatgttgagatgcaatcaggtgtaggatgtgacacggatgacagccttgatggctctgagtctgaaatgggtggccatagcaatggtgttgaatctcgagcgagtgaggtagtaggctcatctacaagtacccctagcaaaagtgtaggaatcaaggatccagttattaaaaagaagcgcggaaggccagttggttctaggttcaaggcaatttcagagacgggttggtcattgaaatcaaaatctcaaagtgaatcatgcacctgtcagtgcgatgctcataagtgtgtgagctctaagaagaagggacgtgggaaaggcaagtgtaacgagaagaaggtgtcccaatctgagcacacacaggtatgtttttggtttcgtgtctcattttaatcaaagtgtcccatttaattacaatattaactatgctctgtatgagttcatatttaatgtagtgtgtttgaacttaggatgatggagctcaagcctgcagcaatcccggagatgcccctcgtaaggtgactgggatattagctattcatgttcagtgtttttcattattggtgatttgatacttgatatgcatgttcattcttgagccgaagaagtctcttattggtgctttgatacttaatatgcatgtaaatttgttttgatttcaattgtttgcagtcgaaacgaatcaaaaaagtttctttcgttgatgaggaattgaatccggaaggagatactcgtgtaggtgatgtttttaacaatgccaatgaaagtcaggattatgtttccttaagttgactcaacatttaaatgttaaaggtattttattttaaaatttcctctacggcggcataaattttatttacgagcattgcatcattagtatggttgactagaatgttagatacaatgaatgcttttgcgaaaaatgaaaagaaatgtttctgggatcatgctcatgacttcacccttgtttgacaggaaatgatgtttgaattgaagattgttggaacgatttcagctgtgcaatcagggtgcttcaagtgatccgcttcaaaagattaatgctaattggaaactagtgaaagacgattatgcgtgtttccctttaattatgtatttgattgatgcattctttcattaatttgctcactgtgcaaccaggaattctatcttttggattagagctgcaatttgaaacttgaaagaatttgtaaacaggattcaaaagttctcgcattgcatattacgctattcttttgttgagttatacttcattatccgtcactattgccattataatacatagagatttttcttgaacacaataatcatgtgttttgttgcacgatattactaattactgtttgatgatttttaaaccattaacttcatattgtaactttcatttaatgctacagatttttatctaaaattaaaaaaagggcacccaaaaaggattataaattccatgatgatctagttagcttgttgataagataacttctctcccgtatcctcttgaatttgatcacattcacatcatatcaagaaactaaaataggtagaatagattggtgttagttgaaaatagtgcaaagaaacaagctaaggttaataaataagacttattatacaggtgacaagtaatattatcactaattaagctagattctacgtaataaataagacttataataagaccctattaatattcttgacgtggacattgtacgtaaataatggtagtcgagtcaaaatgtatagatagattggagagtcaaaatgtaaataatggtaatcgcaattatttcacccattttcttctttttaatcagcaccatccataacaaacattcgattatgctgtgaacaaatcagatcatgaaagtaagtcaaggtgaacaaatcagatcatgcaaattacaattatgctacaaagaactcaaacttgttccaaagctcgaaatccaagaaagtctcaggggttaaaataaacaatgctaggacaaattcgaatccaaaagtttgtctttcgttcattgcaccatatttaattaaacataaatccatacaaacataagaaattcctaaacatcattcaacacataatagctaatgcaattcgcactcccttccgtattctgctcggccaaacttgggttactccacttccttctttacaccctgaaattcaattgaaatcagtttgcaacttacatgagtcgacaacaggacaatgaagttattaaaataggtgacacaaagaggcagcacacaagaatctagattaataccccaaaatgcattttgataattaaacaagaatctagtttgcaattttgtgttaacaacaaaccagtgggcatttaatttatgttttaaaatattactaaaccctaaacccttaactttgtttatattaaaccatgcacaaccattaactttgtttatattaaaaattatgttataaaatattactaaaccctaaacccttattcggatatggtcatacctcgatgcgaccatgcatctccccctctattagctgtgagcgagtgaagtgcaccttgccttcatcccaaagcattaagaggccgcctgttttccctcgtggaggagtgtacaccattttgtaatgtaggccaactgcttcaaggatgttgttggtgtggaatggggaagttctactctcagagatgaagagtacacatggcgtgtgatgggtggccaagtgat

SEQ ID NO: 100 - DNA, 4546 bp, Kochia scoparia
ccctcgttttcctcttctttttttccatacaggttttgtagtcatttagtggaggtgggttgatctcctaataaagtgggtttgtcgattcttctttcttctgcaaccagcagagccgagttgaattgaggtgcagccttgaggaagacctgaaacaaagtcattacaaagagaattatagatgttcatgattctgtgtaagcctgatgagctttgtaaaactttgtagtttgtgcaatttggtaattgattttgtaaccaccatcgttatctttagcgcgccttatggtaaatttggaagcataatgagctaaaagatcccaatttggctttgtaaaattgctattgattggaaccttgtttttgggagcttgaaacgattacttcaaacaaacaaaaaaaattgttgatgccgtaatgcggtatatagtgtttgtccttaattagacatttggggttttttttcccaacttgaatttgacaaagatgagatcccaggaataagtgacagccaaaacttaagttggtgcaacaactagtgtaattcataaattttgtatggtgtgatagtgtcaaaattataactagggcacacaaaatgactgcaataatgcttaataagcactaaatgtactttgtgtcgaattttgagtcaagtccacgtgtctttggatcggataagacagtccatggtttagccaacgagtcaggttcacgtgtctttgggtcgtataagacgatccatggtctaacccggtgacgatgcgccgtgccctagttgcccactagtaggcaaggaaagtggtgtttgcatggagcctaagaagatatggattaggctgtcactgatcccttgtggccttgtatgttaatcaaattattagtagaggttataaagggggggttggtgagctactaaactgattgccttgttgattgacaaaaccattttatgattttagttccatctttattcaatagtttatatatggtgtgctacactagtattattactattatatgatggaatattattctctccttttctttcacacatattctttttatctactacattaatttatataataccacatgaagtatatacaaagttgcttatttcttatgtaataagcacatgatcattgtgatattaattaatcttttcgtggagaaaatgactagaggaaaattcaaaatattaaagtgtttttatgaacaaatgaacaaatggtgttaatctaatttcatagacaagttggtaactatggtcaatcacctcgggaaaaagtaatgacaattgtatcgatagtttggttcatgtggaatcaaaaaaatttatcgaattcatattattaattttgtgtgcgaatgaatatctatatttcatggaatattgactaaattgtgtgatttagactaaataaaaatgcattaacgagagtcgatgaaatcgttaaaggattaaaacattaataaaatgatttatattttaactttttcatagttaacctaaaatagacaaaaaattactcatactcgatataaaaaaggatttttttatatataaataaacatagagatatataattttaaaaaaaaatagctcgaacttattctcccatttgttttatcctttattgatgtaaatcactaacaaagttaattatcattccattcttaattttttttaatgaaggtcaatattcttacaatagtgattagctttttcaatataattttgttccaaaaaaaatattagtgatctttctttttaaaaaaaatggtagcactagcacaccaacactctcacaaattcaaccacaacaacccatgtttttgatttgcccaatttcttcttcaccaacccccttctctcttccacctaattttggttggtgaatccttcttctcattctctctcctaaaaagaagcttaaacccatcgtcaatcatatagtattagccatcaaaaacaacaacaagagagagaagaaacaatggctcaagctaccacctttaacaatggtgtcaaaaatggtcatcaattatgcgccaatttaccaaaaacccacttgcccaaatctcaaaaagctgtcaaatttggatcaaacttgagattttctccaaagttgaagtctttcaacaatgaaagagtttctgggaaatcatcagttgtttttaaggttcatgcttcagttgctgctgctccctcaacttccccagaaattgtgttgcaacccattaaggagatttctggcactgttcaattgcctggttctaagtctttatctaatcgaattcttcttttagctgctctttctgaggtacttttcgattgtttgatttcatcttttaccctgaatttggcgtttgtttaatgcagtttttgtgttttgaatctttgtaatttatgttaagttttaaaagaatgatgcttcttgtttctcttgttgtttgtgcattggttgttggattggtatcattgagaaatatgtatgcattagtaaaaattggtgtgttttgtgtagttttgcattaagttgtttaattgatatcattgagaaattgggttcagtacattgtttgactttggaatataaaaattggtggaaaaaaaacagcagatttttaacaaatgattgttatgtgaagatttgttatcatataatggaggatgaaagtcctgaagttgtatgaactagatgataaaacctcactttcactgatttcggggtggacaatcaaagaaccttgatcgagtaggagcaaaatgacaccctgaacatagatgaacaggcttcataatatatgtattcacttgatgctttcggttacctcgaactgctgatgaggttgaggaaattgggatgtgtggtgcactttttcattttggtggcaagaatgcaagccttatggtacggcttgggagcgatcactgattagttggctcaagcttgacttttctagggagactatctcgaggaaggtggtttagtttaatacggtgtacagtagtcgaatcctcacaaatcacaactcaaatccaagtaaaagggacaactacacatgaaactcagattagttcatttatcaatacctcaagaacatacttaaggaaccaagtacaatttcttctctagatattgaaaggggaggaagtgatataaaaacctaaactcttgtcaggccacacttaaaggtccacatcatataccccagaactataggttaaagacatacagtacataagaattacgtcgatatgttgaaagaactgtcagattctaacataattgcacacaagcattcctctacaatctgagtttaacgaaattcccatcgcctgcttgcaacaatgggcatcgtaagtccattcactagcaccttcatcttcaccttcaccttcacttgacccagatggcacattgtagtgcaatttgaaaaactattctgagaacttacataaccagcctttgttcatagttacagtccttcgaatcctactccttaggcatgcacaatttcttcctatcaataaggagcttttaggttctcaaaactgaggtgggaaggaaagttgagaatagtatgcatttaagtttgttttttcatttttcgttcctgaacaactacacatgtctcctgtagatggactttggtactagtgtaattctgtgtcagtctcatgtctgctgcgtttttgcaccctccctttttctttgaccttgtgttgtcctattttctaaagtttcaacaacctaaccaaatttatgctgcagggtacaacagtacttgacaacttgctatatagtgatgatattcgctatatgttggatgctctaagaactcttgggctcaacgtagaggatgataataaggccaaaagggcaatcgtggagggttgtggcggtctatttcctgctggtaaagagaataggagtgagattgaacttttccttggaaacgcgggaacggcaatgcgcccattgacagctgcagttgccgttgctggaggaaattccaggttagtgaataacgatttctatgtggatgtaatactgataggtttgtgtaaggcttatgatatagttgcacgataggtctactagaaagatgctattcattgtgaaaaaatatgttagattaatgtttgtgaaatgaaaatttaaagagattgtaactgtggaagtattgctgatggatgaacacaaactagatataattaaaaggctaacagcgtgtattatctcgttaatatctgatgaactttttcagatttatctaaacataagctattgtattgggattaggataattctcgtagtccagacatcctgtcatggagtaaggattcttaagactatggatggttaattcaaactctggcaatcatcttttggtagtgagaaaactgctgtcttttttagaatcttctttatccataaactcttaaatcctaaataaaccggaagcaatcttggtcgttgatttttgagatgtatggtcaagatgtgcataagtttaatagtaaatgtgcatattt

SEQ ID NO: 101 - DNA, 57 bp, Kochia scoparia
gtttttgcacattcacaggaaaattcgtgcacatttacgtacaaaaatttgcacatt

SEQ ID NO: 102 - DNA, 1548 bp, Kochia scoparia; identical to SEQ ID NO: 97

SEQ ID NO: 103 - DNA, 5426 bp, Kochia scoparia
ggggtatttcatggaaaacgcaaatttacaggggtaccctgtagaaaatcccaacaaaaaaaattgttgatgccgtaatgcggtatatagtgtttgtccttaattagacatttggggttttttttcccaacttgaatttgacaaagatgagatcccaggaataagtgacagccaaaacttaagttggtgcaacaactagtgtaattcataaattttgtatggtgtgatagtgtcaaaattataactagggcacacaaaatgactgcaataatgcttaataagcactaaatgtactttgtgtcgaattttgagtctagtttacgtgtctttggatcggataagacagtccatggtttagcccatgagtcaggttcacgtgtctttggatcgtataagacgatccatggtctaacccggtgacgatgcgccgtgccctagttgcccactagtaggcaaggaaagtggtgtttgcatggagcctaagaagatatggattaggctgtcactgattccttgtggccttgtatgttgatcaaattattagcagaggttataaaggggggttggtgagctactaaactgattgccttgttgattgacaaaaccattttatgattttagttccatctttattcaatagtttatatatggtgtgctacactagtattatatgatggaatattattctctccttttctttcacaaatattctttttatctactacattaatttatataataccacatgaagtatataaaaagttgctttttcttatgtaataagcacatgatcattgtgattttaattaatcttttcgtggagaaaatgactagaggaaaattcaaaatattaaagtgtttttatgaacaaatgaacaaatggtgttaatctaatttcatagacaagttggtaactatggtcaatcacctcggaaaaagtaatgacaattgtatcgatagtttggttcatgtggaatcaaaaaaatttatcgaattcatattattaattttgtgtgcgaatgaatatctatatttcatggaatattgactaaattgtgtgatttagactaaataaaaatgcattaacgagagtcgatgaaatcgttaaaggattaaaacattaataaaatgatttatattttaactttttcatagttaacctaaaatagacaaaaaattactcatactcgatataaaaaaggatttttttatatataaataaacatagagatatataattttaaaaaaaaatagctcgaacttattctcccatttgttttatcctttattgatgtaaatcactaacaaagttaattattccattcctaatttttttttatgaaggtcaatattcttacaatagtgattagctttttcaatataatttttttccaaaaaaatattagtgatctttctttttttaaaaatggtagcactagcacaccaacactctcacaaattcaaccacaacaacccatgtttttgatttgcccaatttcttcttcaccaacccccttctctcttccacctaattttggttggtgaatccttcttctcattctctctcctaaaaagaagcttaaacccatcgtcaatcatatagtattagccatcaaaaacaacaagagagagaagaaacaatggctcaagctaccacctttaacaatggtgtcaaaaatggtcatcaattatgcgccaatttaccaaaaacccacttgcccaaatctcaaaaagctgtcaaatttggatcaaacttgagattttctccaaagttgaagtctttcaacaatgaaagagtttctgggaaatcatcagttgtttttaaggttcatgcttcagttgctgctgctccctcaacttccccagaaattgtgttgcaacccattaaggagatttctggcactgttcaattgcctggttctaagtctttatctaatcgaattcttcttttagctgctctttctgaggtacttttcgattgtttgatttcatcttttaccctgaatttggcgtttgtttaatgcagtttttgtgttttgaatctttgtaatttatgttaagttttaaaagattgatgcttcttgtttctcttgttgtttgtgcattggttgttggattggtatcattgagaaatatgtatgcattagtaaaaattggtgtgttttgtgtagttttgcattaagttgtttaattgatatcattgagaaattgggttcagtacattgtttgactttggaatataaaaattggtggaaaaaaaacagcagatttttaacaaatgattgttatgtgaagatttgttatcatataatggaggatgaaagtcctgaagttgtatgaactagatgataaaacctcactttcactgatttcggggtggacaatcaaagaaccttgatcgagtaggagcaaaatgacaccctgaacatagatgaacaggcttcataatatatgtattcacttgatgctttcggttacctcgaactgctgatgaggttgaggaaattgggatgtgtggtgcactttttcattttggtggcaagaatgcaagccttatggtacggcttgggagcgatcactgattagttggctcaagcttgacttttctagggagactatctcgaggaaggtggtttagtttaatacggtgtacagtagtcgaatcctcacaaatcacaactcaaatccaagtaaaagggacaactacacatgaaactcagattagttcatttatcaatacctcaagaacatacttaaggaaccaagtacaatttcttctctagatattgaaaggggaggaagtgatataaaaacctaaactcttgtcaggccacacttaaaggtccacatcatataccccagaactataggttaaagacatacagtacataagaattacgtcgatatgttgaaagaactgtcagattctaacataattgcacacaagcattcctctacaatctgagtttaacgaaattcccatcgcctgcttgcaacaatgggcatcgtaagtccattcactagcaccttcatcttcaccttcaccttcacttgacccagatggcacattgtagtgcaatttgaaaaactattctgagaacttacataaccagcctttgttcatagttacagtccttcgaatcctactccttaggcatgcacaatttcttcctatcaataaggagcttttaggttctcaaaactgaggtgggaaggaaagttgagaatagtatgcatttaagtttgttttttcatttttcgttcctgaacaactacacatgtctcctgtagatggactttggtactagtgtaattctgtgtcagtctcatgtctgctgcgtttttgcaccctccctttttctttgaccttgtgttgtcctattttctaaagtttcaacaacctaaccaaatttatgctgcagggtacaacagtacttgacaacttgctatatagtgatgatattcgctatatgttggatgctctaagaactcttgggctcaacgtagaggatgataataaggccaaaagggcaatcgtggagggttgtggcggtctatttcctgctggtaaagagaataggagtgagattgaacttttccttggaaacgcgggaacggcaatgcgcccattgacagctgcagttgccgttgctggaggaaattccaggttagtgaataacgatttctatgtggatgtaatactgataggtttgtgtaaggcttatgatatagttgcacgataggtctactagaaagatgctattcattgtgaaaaaatatgttagattaatgtttgtgaaatgaaaatttaaagagattgtaactgtggaagtattgctgatggatgaacacaaactagatataattaaaaggctaacagcgtgtattatctcgttaatatctgatgaactttttcagatttatctaaacataagctattgtattgggattaggataattctcgtagtccagacatcctgtcatggagtaaggattcttaagactatggatggttaattcaaactctggcaatcatcttttggtagtgagaaaactgctgtcttttttagaatcttctttatccataaactcttaaatcctaaataaaccggaagcaatcttggtcgttgatttttgagatgtatggtcaagatgtgcataagtttaatagtaaatgtgcatatttttttggtttttgcacattcacaggaaaattcgtgcacatttacgtacaaaaatttgcacatttacttttttcatgaaataaatcttgatccttcattcaaaatccaacgatcaaaattgcttctcacgtttctcattttaagggtgcttctcatttgatcctaaatctatatacatatgtaagtaccttgaatgccatggaattgaaattttaaattatgtgttggttgtgaatggggttaatgaagtagatagagtaggctgacaaatattccaaggggtacctacagctactcttggtcactaagtcattgttctgtttttagattttaattgctttcccttatggttttttcagttatgtacttgatggagtgccaagaatgagggagcgacccattggggatctggtagctggtctgaagcaactgggtgcagatgttgactgttttcttggcacaaattgtcctcctgtaagagtaaatgctaaaggaggtcttccagggggcaaggtagagtaaatttcttgtagattaactttgttgataattcactcattaatatatcaatgagacatcctcaaaaaataactctgtcctgttttcctgtcattaagctctgttacataacttacattattttaaagcattttgatggaatgtatctgcaggtcaagctctcaggatcagttagtagccaatatcttactgcgctactcatggctacccctttggctcttggagatgtggaggttgaaatcattgataaattgatttctgtcccttacgtagagatgacaataaagttaatggaacggtttggagtgtcaatagagcatactgctagctgggacaggtttttgatccgaggtggtcagaagtacaagtaagtcactcttcttttacttgcatgtattgaacgtcattccattggtagactgatgcagcattaataatatgtcagatctcctggaaatgcatttgttgagggtgatgcttcaagtgccagttacttcttagcaggggccgcgatcactggtgggactgtgactgttgagggttgtggaacaagcagtttgcaggtatgatccaaagcctcacttcaataaattttcaagtacacattcgttttacttcctccgttttgtattactcgcaccggtttccattttgggaaatttgcgaatacttgcaccactttgctttattcccttttttggcaatttattttgtttgaaatga

SEQ ID NO: 104 - DNA, 2430 bp, Kochia scoparia
cactacccttccctcaactaattataccaacaaaaaaacgccttggagtccgcaataatgaaagtggtgcgagtaatataaaacggaggaagtatttattttttagattaactgttgtaaccattttttggttaattttgaggctaaagtatggccttttgacaattaactttcaatattaatctctaatgtggtgtaaagtcatccattttaatatcagacaattgtgtttgactcccaaaaaaggataatttacttcttattgttttgtgactgccaaaaaggatcacttgaatgtcatggattgtttaatcacctatttaggcattgttgtgttgtgattcacctcatctttaggtccaatagattttggctgaatcttacttgtgactgccaaaaaggatcactgacaatttacttgtttaacggattttactcagggtgatgttaaattcgcggaggttcttgagaagatgggttgcaaagttacatggacagagaccagtgtcactgtaactggaccgcccagggactcatctggaagaaaacatttgcgtgccatcgatgttaacatgaacaaaatgccagatgttgcgatgactcttgctgttgttgccctatatgcagatgggcccacagctatcagagacggtattaactcctttctgatacattacacttttcttgtgctatatattgtttcaaatttgataattcgatcatgcttcaaattttgcacacagccgtaatccatggttataaaatgactatgacacttgtcttgttactgaaaagtgcatacagtaacaaagctgatgttacttcttagtttactctaataatggttggacggtcactggcgcacatccccatggttggaagttgtgaatattgttgtcataatggcttatggagcatcttttggtacacttcaggagtaaaagaccactagtccagtatagggttaatcacctctagaactagttagtcacatatactcggaaaattattcatattttgtggttacatgcgttcgtttatctgcatcttgcctagtgtctcctcttgaaatcattcatatatgttcttttttttccccttcatctgttacatgttcaaaatatgcttacaacgaaattgggtaacttgaccagttgctagctggagagtgaaggaaacagaaaggatgattgccatctgtacagaactcagaaaggttagccacattctttaatcttgtagtaaaaaataaagttgcctgtttcatgtaagttgatgttaattcggacttttaaaattttcagcttggagcaacagttgaggaaggacctgattactgtgtgatcactccaccagaaaaactaaacgtaaccgccatcgacacatatgatgatcatcgaatggccatggcattctctcttgctgcctgtgctgatgttcctgtcactattaaggacccaggctgcacccgcaagaccttcccagactactttgacgtcttggaacggtttgccaagcattgagcggctatctgcagatttttcataaagtatgcacgaaagtttcaatttaagaagataccgagttgattatatgctttccgcataagttattgtcacattttttgtattatgtttgtaagatcttaggcaataagatatactgttagaaattatgtgtatctgattatttagagatgtatacttgggtcagttgaaattgtacgagaaaggtctggatttcgaaaaaaatgtgatccagacattagtgtggtctgaactgaagcaagtactccctccgtctcataattctcacaactcttgctattatttgtgagaaataaaatattcaagtgttgcgagaattgtgtgacagcgggagtagcaacttttcaagtttggaattaattttgtgatgtgagttttttgtgtattctttgttttccatcaaaccctcctccaaagtacaaacccaattcatggtatggttgatgcaacagcaatatgtcaaaatcagtgtttgtgatgttggcttctctacttcattatctcttcttgttcagtatgatttcgcaatctcttcccgtcaaaatcccttctcctctgataatcgcagaaatcgtgtcttcccctcggtgtgtatccacctcttaaaaatttgttgagagttgaaatgtgctgccactggattcatcctttagggcgaattttgaacggattttaggtggttaggattcaacccctgtcaattatagttacgggaattagacacgcgttctgccttaccaaccccatttttttgtcactatatcaagtatccattgctagttgtagtcatgtagtagggtctgaaatctaaagcaaagtagcaagattgcaacaacaggaacagcaaataaatctagacttttgaggtttgtttttttttttt

SEQ ID NO: 105 - DNA, 4880 bp, Kochia scoparia
tcaccttcacttgacccagatggcacattgtagtgcaatttgaaaaactattctgagaacttacataaccagcctttgttcatagttacagtccttcgaatcctactccttaggcatgcacaatttcttcctatcaataaggagcttttaggttctcaaaactgaggtgggaaggaaagttgagaatagtatgcatttaagtttgttttttcatttttcgttccctgaacaactacacatgtctcctgtagatggactttggtactagtgtaattctgtgtcagtctcatgtctgctgcgtttttgcaccctccctttttctttgaccttgtgttgtcctattttctaaagtttcaacaacctaaccaaatttatgctgcagggtacaacagtacttgacaacttgctatatagtgatgatattcgctatatgttggatgctctaagaactcttgggctcaacgtagaggatgataataaggccaaaagggcaatcgtggagggttgtggcggtctatttcctgctggtaaagagaataggagtgagattgaacttttccttggaaacgcgggaacggcaatgcgcccattgacagctgcagttgccgttgctggaggaaattccaggttagtgaataacgatttctatgtggatgtaatactgataggtttgtgtaaggcttatgatatagttgcacgataggtctactagaaagatgctattcattgtgaaaaatatgttagattaatgtttgtgaaatgaaaatttaaagagattgtaactgtggaagtattgctgatggatgaacacaaactagatataattaaaaggctaacagcgtgtattatctcgttaatatctgatgaactttttcagatttatctaaacataagctattgtattgggattaggataattctcgtagtccagacatcctgtcatggagtaaggattcttaagactatggatggttaattcaaactctggcaatcatcttttggtagtgagaaaactgctgtcttttttagaatcttctttatccataaactcttaaatcctaaataaaccggaagcaatcttggtcgttgatttttgagatgtatggtcaagatgtgcataagtttaatagtaaatgtgcatatttttttggtttttgcacattcacaggaaaattcgtgcacatttacgtacaaaaatttgcacatttacttttttcatgaaataaatcttgatccttcattcaaaatccaacgatcaaaattgcttctcacgtttctcattttaagggtgcttctcatttgatcctaaatctatatacatatgtaagtaccttgaatgccatggaattgaaattttaaattatgtgttggttgtgaatggggttaatgaagtagatagagtaggctgacaaatattccaaggggtacctacagctactcttggtcactaagtcattgttctgtttttagattttaattgctttcccttatggttttttcagttatgtacttgatggagtgccaagaatgagggagcgacccattggggatctggtagctggtctgaagcaactgggtgcagatgttgactgttttcttggcacaaattgtcctcctgtaagagtaaatgctaaaggaggtcttccagggggcaaggtagagtaaatttcttgtagattaactttgttgataattcactcattaatatatcaatgagacatcctcaaaaaataactctgtcctgttttcctgtcattaagctctgttacataacttacattattttaaagcattttgatggaatgtatctgcaggtcaagctctcaggatcagttagtagccaatatcttactgcgctactcatggctacccctttggctcttggagatgtggaggttgaaatcattgataaattgatttctgtcccttacgtagagatgacaataaagttaatggaacggtttggagtgtcaatagagcatactgctagctgggacaggtttttgatccgaggtggtcagaagtacaagtaagtcactcttcttttacttgcatgtattgaacgtcattccattggtagactgatgcagcattaataatatgtcagatctcctggaaatgcatttgttgagggtgatgcttcaagtgccagttacttcttagcaggggccgcgatcactggtgggactgtgactgttgagggttgtggaacaagcagtttgcaggtatgatccaaagcctcacttcaataaattttcaagtacacattcgttttacttcctccgttttgtattactcgcaccggtttccattttgggaaatttgcgaatacttgcaccactttgctttattcccttttttggcaatttattttgtttgaaatgaccattttagccttattgtttttccccacatggtgggatcaaaggaattaacaccataaaacacacctcctttataccccaccaacttaatcacactacccttccctcaactaattataccaacaaaaaaacgccttggagtccgcaataatgaaagtggtgcgagtaatataaaacggaggaagtatttattttttagattaactgttgtaaccattttttggttaattttgaggctaaagtatggccttttgacaattaactttcaatattaatctctaatgtggtgtaaagtcatccattttaatatcagacaattgtgtttgactcccaaaaaaggataatttacttcttattgttttgtgactgccaaaaaggatcacttgaatgtcatggattgtttaatcacctatttaggcattgttgtgttgtgattcacctcatctttaggtccaatagattttggctgaatcttacttgtgactgccaaaaaggatcactgacaatttacttgtttaacggattttactcagggtgatgttaaattcgcggaggttcttgagaagatgggttgcaaagttacatggacagagaccagtgtcactgtaactggaccgcccagggactcatctggaagaaaacatttgcgtgccatcgatgttaacatgaacaaaatgccagatgttgcgatgactcttgctgttgttgccctatatgcagatgggcccacagctatcagagacggtattaactcctttctgatacattacacttttcttgtgctatatattgtttcaaatttgataattcgatcatgcttcaaattttgcacacagccgtaatccatggttataaaatgactatgacacttgtcttgttactgaaaagtgcatacagtaacaaagctgatgttacttcttagtttactctaataatggttggacggtcactggcgcacatccccatggttggaagttgtgaatattgttgtcataatggcttatggagcatcttttggtacacttcaggagtaaaagaccactagtccagtatagggttaatcacctctagaactagttagtcacatatactcggaaaattattcatattttgtggttacatgcgttcgtttatctgcatcttgcctagtgtctcctcttgaaatcattcatatatgttctttttttccccttcatctgttacatgttcaaaatatgcttacaacgaaattgggtaacttgaccagttgctagctggagagtgaaggaaacagaaaggatgattgccatctgtacagaactcagaaaggttagccacattctttaatcttgtagtaaaaaataaagttgcctgtttcatgtaagttgatgttaattcggacttttaaaattttcagcttggagcaacagttgaggaaggacctgattactgtgtgatcactccaccagaaaaactaaacgtaaccgccatcgacacatatgatgatcatcgaatggccatggcattctctcttgctgcctgtgctgatgttcctgtcactattaaggacccaggctgcacccgcaagaccttcccagactactttgacgtcttggaacggtttgccaagcattgagcggctatctgcagatttttcataaagtatgcacgaaagtttcaatttaagaagataccgagttgattatatgctttccgcataagttattgtcacattttttgtattatgtttgtaagatcttaggcaataagatatactgttagaaattatgtgtatctgattatttagagatgtatacttgggtcagttgaaattgtacgagaaaggtctggatttcgaaaaaaatgtgatccagacattagtgtggtctgaactgaagcaagtactccctccgtctcataattctcacaactcttgctattatttgtgagaaataaaatattcaagtgttgcgagaattgtgtgacagcgggagtagcaacttttcaagtttggaattaattttgtgatgtgagttttttgtgtattctttgttttccatcaaaccctcctccaaagtacaaacccaattcatggtatggttgatgcaacagcaatatgtcaaaatcagtgtttgtgatgttggcttctctacttcattatctcttcttgttcagtatgatttcgcaatctcttcccgtcaaaatcccttctcctctgataatcgcagaaatcgtgtcttcccctcggtgtgtatccacctcttaaaaatttgttgagagttgaaatgtgctgccactggattcatcctttagggcgaattttgaacggattttaggtggttaggattcaacccctgtcaattatagttacgggaattagacacgcgttctgccttaccaaccccatttttttgtcactatatcaagtatccattgctagttgtagtcatgtagtagggtctgaaatctaaagcaaagtagcaagattgcaacaacaggaacagcaaataaatctag

SEQ ID NO: 106 - DNA, 6967 bp, Lolium multiflorum
gataaactgatctctgttccttatgttgaaatgacattgagattgatggagcgttttggcgtgacggcagagcattctgatagctgggacagattctacattaaaggaggacagaagtacaagtaagttttgaattgttctgcttattctaagcatttgtcacatttgacttctggataaactacagaattgaatattagaaagaaatattgactgctcaagtaactttatttatctggaaatgaccatgctgttattagctatgaagtcaagctttactaggaaatcagtgccttaggcaattgactatgctacttacaatgcactggctgcacagctatgttttctggtgcataaacatttattcatctggctaggaccaaacttttagtagctatgaactgtactaggaaatcactgcctaggcaaaactccacaatttacaatgacattgcatggttttattttcttgtgcataaatttggtcacatcagaagtgccatccatctaaaaaatcggcgaaaattgagaacataggcagcttaatgacagcggtttggcaataagcattttttgcagacgattcttgctttgcttcttttagccctttttattgttatataccctgccaaatgtcgcatcaggatatctgctgccaaatgttgcatcaggatatggatcgtggttttactgagcatacttcactgatgtaattgaaaactgtcagttcaaacttcataaaagttgtagtaatggcttcctaacaagccctcccttgctctggaatttacaattgacaggtcccctggaaatgcctatgtcgaaggtgatgcctcaagtgcgagctatttcttggctggcgctgcaatcactggaggaactgtgactgtccaaggttgcggcaccaccagtttgcaggtagaactgtactatcagtttttaccattggttaagcatacttgcagtataacataatcaaagatatactgctgtcaaccaaacatgctttaagtggacattcatttatgaatctataatataactacagtaccgtaatttggttttcttgtgctatatccctgatgatgcctaatattgcagggtgatgtgaaatttgctgaggtactagaaatgatgggagcaaaggttacatggaccgacactagtgtaactgttactggtccaccgcgtcagccctttggacggaaacaccttaaagctgttgatgtcaacatgaacaaaatgcctgatgttgccatgactcttgccgtcgttgccctttttgccgatggtccaactgctatcagagatggtaaaccgtcttatgtgttgctgttgatttcatttggatggatttagctacagcgcatgatttgttgctgacacttgtccattctcctctgcagttgcctcctggagagtgaaggaaaccgagagaatggtggcaatccggacggaactaacaaaggtagcacacctatctccacttcttatatttcagctcactgttgcactccccagtgcttagtctcacctgttgtgtgcctcgtgctatagctgggagcaacggtagaggaaggcccggactactgcattatcacaccaccagagaagctgaacgtcacggcgatcgacacctacgatgaccaccggatggcgatggccttctcccttgccgcttgtgctgaggtgcctgtcacgatcagggaccccgggtgcacccgcaagaccttccccaactactttgacgtgctaagcaccttcgtgaagaactagctccttttgtagcctgtccatggtttgaggaaatttttactgttttggtccttcttgcgaaatgatttatgagtctgtaatactagttttgtagcatgtcgtgggccttttgaggtaaaatgagttgtaatgcataccgagttcgttttgaataagaagcaagttaggcgtaccatactgtgatctagatgttcgtctttcgtttccagaaatattatgttggctgctggtactcgagtgtgttcgaaaacaacatgatagccatgggatttgggagatgacatgtgggtatgtggctacttgaggaagatcttcatcaaagcaaccaagaacaccagccgatggtaaaacagtgcagcttgcacgaagaacgtttgcctacactgcttggtaaaagcgaaggtttggtttgataaatttctcagcagtattttgtaatgcttcgatggtaattcttctacgcaaaccatcagcctcaatagtaatcctgtgcagtatttttttagtagccctcggcacgcttgaactgtaattcttcaactaaaaactcagcttgaaaataattattcgttgttaattgttcaacaataattttcctagcgcttaattggtgagaggtaattctcagcagcagtaattctcccaatgcaaaatctttaactccaattggagcggcttctccacactccaccgtgcttcactgtagagcttcatcttttaccaacctggacccgcggaacaagaaggtcatggttacatggaccatggtacaggaaacagagcaggccacacgagacacgactatagcagcacatcgttggttccccacaaccgattccagcgactggcctggcggcgcgcatgtagagcaggcgaccggtgagacacaacggtacttcaccggcggctcctatggatttcacatggaggctgtgagcaggtaagtgcgtgtttttttctcgattggaaactatgggtgagaaatttgtccccaattatggcgggcggccgattatttctgccattgcggtgcgccaatctacgagggcacagttgttgtgcctgaaaatggtgcaaatccatccgtgatgcagtgctggaaggcggtgcctgcagccatgtcgggtcagttgagccagatccatccgtggcgggcatcttgcaagtgctacctagcaggtgccgacaacggaaaaggggacggggaggccgattcaacgcagtgcaccatgaatcagacatcgatggaccgcgccaagaggtaaaaaagtaaatcatattcgtaatttctgaaattttggaaaatgtcagtcattgtgtaggtggataacatataaaaagcagcccaggaatctgagtttggtagaccggtgtaagcaacacatgagaattggccaggataaaagaaaaatcatgtcgatttgagtaagctgatcgtccatggtcagttaaagaattgttattgtgaatgatgcagtgatgtgaagttagtgaacattagaaggggttgtgcgttgtagttaaagttcaaatttagctggaaatggcatgaatctgagccaggttgtgaactcctgaggtatgaagttctgtatagaaaagaaattgttcagttgttgagtgaactggatgtaggtaagtggcagtgatgataaggtagaatttacacatacaaagatagcatgaatttgtagccctggctagcaggttgccaacagttatcagtttgtgcagttgcgtgtaaaaaggaaaaatgatgatgaaagaattagtatgagtgttctgtagacctaactaacctatggtagatgttgcgaacctgtgcaggataaagatgggtcaggcgccatcagacatggcgccatgtctttcgagaccgagtgctcttgagaaatcaatatgtggctacacagaaaagctaggttgggaggggtgcacatggagacacaatggttgccggtgcaatagcgggtacagaacagacacaaaaatacctttgatgtttgcatgcattggctgaacagaattagatcacgtatttgcaggggttccagaaaaaaatgcagcacactgaggccgagggggttgctgctggattatcatccgatgaaatatttacaagataactacatgagctctacagtttgaacagtacgttccaatatcactagttttaataatttatccaaacacatctgtaaagaaaatgcagataataacgttgatctgacatgtttggtcagttcttgacgtggacaaggtaacaagtgaaacaataaaaggcgctacagtctcggcacacgctagtcgagttgcatctctcggaggaaaaggtgctcctaaattttcagcaggtgagttctccttctgtttgcagcacacctcgtgtttgtattccccatgatggaaaaattaaggggtatgcatgattttaattcagaaaattgtgtggctccgcagatgccccgtccaattgtggagctgttgtgatatcgaggaactaaagtgccagaaatggatgatgacgtgctagatgctccaggggctgaaacggtggcgtcaaacccgtccatgcctatctgaggtaggagaaacaaacgagatcacactggtttacctttgaatgcactatgcaccgaagagagttcggtttgcatctggtgccacctcagtgggtggacaatctagcatgagagggtaggaatctcatggacgcatgtaattttcacagagacctgtgttttatgttgtggggtgtgcaaattcagtaacctaatgatgcctactttttgtcaagaaaaatatagttaatgagtctggctgatcgtgaggaactgacagctacctaatcgggcagtggtaatgggtttagctgtgcatatttgtgatagtgtgctcatagattcttctaattctgataatggtttacggttatccgtaggtcaaggaggacatagtgatagggagtgcaaagacgaccagtacaactcatcatggtgcatcagcagcagctggtaattcatgaatttgagtatatacctgggatacaaaaggtgagggttggataagtcttaatgccatgttatactgcgtattcagcaggtgcagcgagtggcgacgtatccagggggcgtcgtccagttgaagcctcggcactataactggtatgtcgtgctcaagtggtaatgacattactatgtgatggtgaaaaaactttgcagttgagtgtactccgaatctgatatggctagttgttgcgcactgtctgaaagttgtgcttctaccctttgctgtaggtatacggactttcgttcagcttccaggcatagagaagcacattcggtgctcattcagatagacgataaggattgcgcgaagagagagctagactagcagttcccaatcacagacgatgcaggggtgcagcatgatcagccagtccttcaatatggatgagatgggcgaagccatggatctcggggaatgtatccacaaagataccacccctgttccgcaatgaaggagttctagtcgtgagcaatgctacatctaggggctcgtttttacaaaatcgaacttacgggctgacgtggagaatcatggagggattaaggttcctcaaatcaaatcatgggaggagaaagatttgcaccacccacgttcatccacctcatcccgtaaaaccaccccgtaacaaaaatcccataggtgtaggattattggtttattaatcgggatactgactccaatactcacaaatatacgcacatgggcttccatctgtctgggcatgattggtccaggacgcgagtgtagatgcacccgggagccaaaccacatttccttctctcgaagctaaaactcgtttagtttttcattagttaggctcaggttattcagatcttttttacgttgctagcaatgacaattgtcacaattccaagtgtcatgcagcaaagcagacgccactctttcacgcatagaacaacgatataatctgcagagatactgccgaaatgctaacaatatcaatagcaagccatatatataaacttccaatcagatacaccagagagcaatgaaaattggtgatgatgataactcagacgatagggactcagaatcgtgatgcaaagaacctagtcatacaaaaaccggtctcatactagaaattcaaagacatgtcattctctggtgtctctccacctttttaataaacagataaaaggcactgggtaggataactactggtcggtgatggtcacttcgacctcgacaccaggctcgatagtgatagaggtgatctgcttcacaacgtctggggagctgacaaggtcaatcaccctcttgtgcacccgcatctcgaaccgatcccaggtgttggtacctgatttaacaaaacagagttagccatttcattttggaagatgatgaagcttcagcatagctgcaggtaatgaatgatctgtgacaggctgagcatcagttttaaaaagctcgattttgaaacatcaaatgtatcagacaaaatcatatggaatcatcatctgctcagcccatccacaggatacatgtttcctttccaaaaaaattaaatcaggcgttattgaacaacaagatcttactgccagtagtgctggaagaaccactagacgaattgtatgtagagcaacaaacaagcattatacaggctaatcatcagttttaaaaagctcgattgtgattcctcaaagaaaatctcaggaataacttggtttagcatcatctgatcagcccgttacagaacaaaggtgtaaaaactagcagcacacactcttaacagtagagactgggttacataaatggaggtaatatgtatgaaatacaactgaggtatgctgagaagtgttcatgtttaggatcacaaataaatcagcagatcgccagaagcaatgaatgtacttgctgcagattagcccctagctaacttactagaaaaacccaagcatcagttttaaaaagctcggtttaagatacttcaacgatggaacatctcagtagcatctccttgtaacatcacatgctcagtttacagtaaacgattcgccatgtagactccattttacttgaaatcataccacactaacagaactaccacgaacataataaaaaagcgatgacatgctaagcatcagttttaaaaagctcgatt

SEQ ID NO: 107 - DNA, 1093 bp, Lolium multiflorum
gtagtagctgctggtggaaatgcgacgtatgtttcttttttttatccttacgggaataagtatgagttccgtggttatgctttgagactgatggtttacgtctctcttctgaacttcagttatgttcttgatggagtaccaagaatgatggagcgtcctatcggtgacttaggtgtcggtttgaaacaactaggtgcgagtgttgattgtttcctcggcactgactgcccacctgttcgtatcaacggcattggagggctacctggtggcaaggttagcttcatgaacttccatgttatacgcttttgtacaaacatttcacttgtctggagaaaaaacaagattactgacagagtgagagtagtacggtgcaatgcgaccacacaataactccaaaattgccataaccaataggccctttttcgtgtaaaacagatatgctgattgtattgtggtcttagatcacatgggtctatcatgaactagcacttaacattgaaccacattccacaggttaagctgtctggttccatcagcagccaatacttgagttccttgctgatggctgctcctttagctcttggggatgtcgagattgaaatcattgataaactgatctctgttccttacgttgaaatgacattgagattgatggagcgttttggcgtgacggcagagcattctgatagctgggacagattctacattaaaggaggacagaagtacaagtaagttttgaattgtgctgcttattctaaacatttgtccaaacatttgacttctggataaactagggaattgagcattggaaagaactattggctgctcaactttattcatctggaaatgaccatactgttattagctaagtcaagctttactatgaaatcagtgactctgctacttacaatgcactggctgcacaactatgttttctggtgcataaactatagtctgcccaaataactaccaaacttgtagtagctatgaactgtacaaggaaatcagtgtggcaaaactccgctacttacaatggcattgcatggttatattttgttgtgcataaacttggtcacatcagaagtgtcatcca

SEQ ID NO: 108 - DNA, 983 bp, Lolium multiflorum
cattgaaagttctattattattttgagtttgcatcttatgttgtttttcctttgtgattttatccattttcttaactagttattcgtttcctgaagtttttagtgtcataactcctaatcacaatcatgctacagggcacaacagtggtcgacaacttgctgtatagtgatgatattctttatatgttggacgctctcagaactcttggtttaaaagtggaggatgatagtacagccaaaagggcagtcgtagagggttgtggtggtctgtttcctgttggtaaagatggaaaggaagagattcaacttttccttggtaatgcaggaacagcgatgcgcccattgacagctgcggttgccgttgctggaggaaattcaaggtttgtccaattatattctttatgtgagtgttgttttttgtgttagtttcaatcatgaaggtactagtgcagaagccgtacccctgaaattttcttattttgtatatatcaattggtaattgatgtaagatatttttccgagaggaataaaaaacagggggatagagaatattaaagtattgttctatcacattaactttttatcaaaggtgtacattgtgtttgtgaagtttatagagctaaagggatggaagggaaggggattgaagaagaggagaaaagaagaagatcctcctttgaataccaaggtttgaacggaagggagaaggaggaaactctaaacaatatggagatgaactgatgaagtttttggatcagaaccgcttgagaatcagagttaagccatgtgaaagtctatgagcatgacttcacctggttaataattttaagctctcaacttctcatcctcttttctttgtcgaaaatgtcatgtcttcatgtgatacgtgcttacataatcgtttcttttgtaaagcgattgtctctccagatttctccccttacgaaaataatccttgaaggttgaagaaatcccttcatttc

SEQ ID NO: 109 - DNA, 591 bp, Lolium multiflorum
agtctacaccaacccactttctctttgcccaccaaaactttggtttggtaagaactaagccctcttctttcccttctctctcttaaaagcctaaaatccacctaactttttcagccaacaaacaacgccaaattcagaggaagaataatggctcaagctactaccatcaacaatggtgtccatactggtcaattgcaccatactttacccaaaacccagttacccaaatcttcaaaaactcttaattttggatcaaacttgagaatttctccaaagttcatgtctttaaccaataaaagagttggtgggcaatcatcaattgttcccaagattcaagcttctgttgctgctgcagctgagaaaccttcatctgtcccagaaattgtgttacaacccatcaaagagatctctggtactgttcaattgcctgggtcaaagtctttatccaatcgaatccttcttttagctgctttgtctgaggtatttatttctcaactgcgaaaacaatctctatttgatattggaatttatattacatactccatcttgttgtaattgcattagtacatacttatgttttgacctttgttc

SEQ ID NO: 110 - DNA, 514 bp, Lolium multiflorum
gggcggtgctctggagaaggtcgtgctgcagcccatccgggagatctccggcgccgtgcagctgcccggctccaagtcgctctccaaccggatccttctcctctccgccttgtccgaggtgagaaaacaagcagacaaagcccctctccctacttctcccctttgtgtgaattgggtgccgagatggtttaggagcaccttatcatgcttggtgctcgtgagatcataagatttttttctttttacttaaaacgatctagccataggatttagttcaaggttactcttcttagtagccaattcctatattcgtttatcgaatcgttagaattatgtagttagttggatcaatattatatgtggccttggatgagcaaaagtcagtttattcactttccactcatcggaatattatagtgcagcatgtcctgtcaacttatttgcagtacgataagcaattgaaactgctttgcttcgctgtcatctcttgctgatcattaactggcttttgctc

SEQ ID NO: 111 - DNA, 460 bp, Lolium multiflorum
caagatatacaacatgcaaattttgccatcgcaaaaggttttcacgagctataaggtactactaaatctaggatcctcctgggcttattcagtttagatccgttggaatattatagtgcagcatgccctgctaacctttgtacagtaagataagaaattgaaactggtttatttcgctgtcgtctcttgttgatcattaactggcttttgctcatcagggaacaacggttgtggataacctgttgaacagcgaggatgtccactacatgctcgaggccctggacgcgcttgggctctcagtggaagcagacaaagttgcaaaaagagctgtagtcgtcggctgcggcggcaggttcccgattgaaaaggatgccaaggaggaagtaaagctcttcttgggcaacgctggaactgcgatgcggtcattgacggcagctgtagtagctgctggtggaaatgc

SEQ ID NO: 112 - DNA, 1377 bp, Lolium multiflorum
acctgaatgggcacttagtattcatgtacctacattcaagacatacaacatgcaaattttgttatcgcaaaaggttttcacgatctgtaagacactacatctaggatcctcctgggcttattcagtttcgacccgttcgaatgttatagtgcagcatgccctgttaacctttgtacatcaagataagaaactgaaacctgtttacttcgctgtcgtctcttgctgatccttactttctctcatcagggaacaacggttgtggataacctgttgaacagcgaggatgtccactacatgctcgaggccctggacgcgctcgggctctccgtggaagcagacaaagttgcaaaaagagctgtagtcgttggctgcggcggcaggttcccgattgaaaaggatgccaaggaggaagtaaagctcttcttgggcaacgctggaactgcaatgcggccattgacggcagctgtagtagctgctggtggaaatgcgacgtatgtttcttttttttatccttacgggaataagtatgagttccgtggttatgctttgagactgatggtttacgtctctcttctgaacttcagttatgttcttgatggagtaccaagaatgatggagcgtcctatcggtgacttaggtgtcggtttgaaacaactaggtgcgagtgttgattgtttcctcggcactgactgcccacctgttcgtatcaacggcattggagggctacctggtggcaaggttagcttcatgaacttccatgttatacgcttttgtacaaacatttcacttgtctggagaaaaaacaagattactgagagtagtatggtgcaatgcgaccacacaataaatttgaaatagccataaccaataggccctattttgtgtaaacagatatgctgattgtgttgtggtcttagatcacacggtctatcataaattagcacttaacattgaaccacattccacaggttaagctgtctggttccatcagcagccaatacttgagttccttactgatggctgctcctttggctcttggggatgttgagattgaaattattgataaactaatctctgttccttacgttgaaatgacattgagattgatggagcgttttggtgtgacggcagagcattctgatagctgggatagattctacattaaaggaggacagaagtacaagtaagttttgaattgttctgcttattctaaacatttgtcacatttgacttctggataaattagagaactgaacattggaaagaactattggctgctcaagtaactgtattcatctggaaatgacgatactgttagtagctatgaagtcaagctttactaggaaatcagtgcctaggcaatcgactctcctactt

SEQ ID NO: 113 - DNA, 1107 bp, Lolium multiflorum
cctacttacaatgcactagctgcacagctatttttttggtgcataaactattgactgctcaaataactttattcatgtggataggaccaaacttttagtagctatgaactgtactaggaaatcagtgcctacgcaaaactccgctacttacaatgacattgcacggttatattttcttgtgcataaatttggtcacatcagaagtgccatccatctaaaaaaatcggcgaaaattgagaacataggcagcttaatgacatcggtggcaataagcattttttgcagacgattcttgctttgcttcttttagccctttttattgttatgccctgctgccaaatgtcgcatcaggatatctgctgccaaatgttgcatccgcatatggatcctggttttactgagcatacttcactgatgtaatcgaaaactgtcagttcaaacttcataaaagttgtagtaatcgcttcctaacaagccctcccttgctctggaatttacaattgacaggtcccctggaaatgcctatgtagaaggtgatgcctcaagtgcaagctacttcttggctggcgctgcaatcactggaggaactgtgactgtccaaggttgcggcaccaccagtttgcaggtagaactgtactgtcaatttttaccatttggttaagcatacttgcagtataacataatcaaagatatactgctgtcaaccaaacatgctttaagtggacactcatttatgaatctataatataactacagtacagtaagttggttttcttgggctatctacctgacgatgcttaatattgcagggtgatgtgaaatttgctgaggtactagaaatgatgggagccaaggttacatggaccgacactagtgtaactgttactggcccaacacgtcagccctttggaaggaaacacctaaaagctgttgatgtcaacatgaacaaaatgcctaatgttgctatgactcttgccgttgttgccctttttgcagatggtccaactgctatcagagatggtgaaccctcttatgtgtttctgttgatttcttttggatgacttccgctacagcttaagatttgttcctgacacttgtccattctcc

SEQ ID NO: 114 - DNA, 480 bp, Lolium multiflorum
cttgtccattctcctctgcagttgcctcctggagagtgaaggaaaccgagagaatggtggcaatccgtacggaactaacaaaggtagcacacctgtctccacttcttattttcagctcactgttgcacccccccagtgcttagtctcacctgttgtgttcctcgtgctatagctaggagcaacggtagaggaaggcccggactactgcattatcacaccaccagagaagctgaacgtcacggcgatcgacacctacgatgaccaccggatggcgatggccttctccctcgctgcctgtgcagaggtgcctgtcacgatcagggaccctgggtgcacccgcaagaccttccccaactactttgatgtgctaagcaccttcgtgaagaactagctcaaggaaaatctacagcatatcgcctttgtacttttgtagcctgttgttcatggtctgaggaattttttactgttttgatcttcttg

SEQ ID NO: 115 - DNA, 318 bp, Lolium multiflorum
ccacgtccgtggccgcgcccgcggcgccggccggcgcggaggaggtcgtgctgcagcccatccgggagatctccggcgccgtgcagctgcccggctccaagtcgctctccaaccggatccttctcctctccgccttgtccgaggtgagaaaacaagcagacaaagcccctctccctacttctcccctttgtgtgaattgggtgccgagatcggaatatagctaggtgcttgtgaagtcgtgagatcataagattttttttcctttttacttaaaacgatctagccataggatttagttcaaggttactcttcttagta

SEQ ID NO: 116 - DNA, 1284 bp, Lolium multiflorum
cagctgcccggctccaagtcgctctccaaccggatcctcctcctctccgccttgtccgagggaacaacggtcgtggataacctgttgaacagcgaggatgtccactacatgctcgaggccctggacgcgctcgggctctccgtggaagcagacaaagttgcaaaaagagctgtagtcgttggctgtggcggcaggttcccgattgagaaggatgccaaggaggaagtaaagctcttcttgggcaacgctggaactgcaatgcggccattgacggcagctgtagtagctgctggtggaaatgcaacttatgttcttgatggagtaccaagaatgagggagcgacctatcggtgacttagttgtcggtttgaaacaactaggtgcgaatgttgattgtttcctcggcactgactgcccacctgttcggatcaacggcattggagggctacctggtggcaaggttaagctgtctggttccatcagcagccaatacttgagttccttgctgatggctgctcctttggctcttggggatgtcgagattgaaatcattgataaactgatctctgttccttacgttgaaatgacattgagattgatggagcgttttggcgtgacagcagagcattctgatagctgggacagattctacattaaaggaggacagaagtacaagtcccctggaaatgcctatgtcgaaggtgatgcctcaagtgcgagctatttcttggctggtgctgcaatcactggaggaactgtgactgtccaaggttgcggcaccaccagtttgcagggtgatgtgaaatttgctgaggtactagaaatgatgggagcgaaggttacatggaccgacactagtgtaactgttactggtccaccgcgtcagccctttggaaggaaacacctaaaagctgttgatgtcaacatgaacaaaatgcctgatgttgccatgactcttgccgttgttgccctttttgctgatggtccaactgctatcagagatgttgcctcctggagagtgaaggaaaccgagagaatggtggcaatccggacggaactaacaaagctgggagcaacggtagaggaaggcccggactactgcattatcacaccaccagagaagctgaacgtcacggcgatcgacacctacgatgaccaccggatggcgatggccttctccctcgctgcctgtgcagaggtgcctgtcacgatcagggaccctgggtgcacccgcaagaccttccccaattactttgacgtgctaagcaccttcgtgaagaactag

SEQ ID NO: 117 - DNA, 302 bp, Lolium rigidium
aaacaacatcatatggtttcttttgtctttatgactagaccactctttattattccttgtattgggatcttattttgaatggttgtttagcctacacctcatgttctagattttgttcgtataccagacttttcttgattgcgatctatttgtcccctggattttgcatagggtgatgtaaaatttgccgaagttcttgagaagatgggttgcaaggtcacctggacagtacaatagcgtaactgttactggaccacccagggaatcatctggaaggaaacatttgcgcgctaatcgacgtc

SEQ ID NO: 118 - DNA, 608 bp, Sorghum halepense
gaggaagtgcagctcttcttggggaatgctggaactgcaatgcggccattgacagcagctgttactgctgctggtggaaatgcaacttacgtgcttgatggagtaccaagaatgagggagagacccattggtgacttggttgtcggattgaagcagcttggtgcggacgttgattgtttccttggcactgactgcccacccgttcgtatcaatggaattggagggctacctggcggcaaggttaagctctctggctccatcagcagtcagtacttgagtgccttgctgatggctgctcctttggctcttggggatgtggagattgaaatcattgataaattaatctccattccctatgttgaaatgacattgagattgatggagcgttttggcgtgaaagcagagcattctgatagctgggacagattctacattaagggaggtcaaaaatacaagtcccccaaaaatgcctatgttgaaggtgatgcctcaagtgcaagctatttcttggctggtgctgcaattactggagggactgtgactgttgaaggttgtggcaccaccagtttgcagggtgatgtgaagtttgctgaggtactggagatgat

SEQ ID NO: 119 - DNA, 647 bp, Lolium rigidium
cgccacgtccgtggccgcgcccgcggcgccggccggcgcggaggaggtcgtgctgcagcccatccgggagatctccggcgccgtgcagctgcccggctccaagtcgctctccaaccggatccttctcctctccgccttgtccgaggtgagaaaacaagcagacaaagcccctctccctacttctcccctttgtgtgaattgggtgccgagatgggattttaggagggttaggtgcatcttatcatgctaggtgctcgtgagatcataagatttttttctttttacttaaaacgatctagccataggatttagttcaaggttactcttcttagtagccaattcctatgttcgtttatcgaatcgttagaattatgtagttagttggatcaatattatatgaggccttggatgagcaaaagtcagttaatggtaattagaattatgtaggacctggtgatcctcttatgtcagtctgatggcttcctcatgaaagtattacgctgcaacgctgtcatggacacctagtattcatatacctgcattcaagatgcacgactttcaaatcttgttatcgctaaaggttttcacaagctataagatcctaaatctaggatcccctccagagtttattcactttccactcatcg

SEQ ID NO: 120 - DNA, 4472 bp, Lolium rigidium
tcctctccgccttgtccgaggtgaccaaacaacccgaaacgcttccccctcctccccttcctttggggtgaattgggtgtactaaagatgggatttttggaggtttaggggcgcacttgtatcttgtcatgctaggtgctggccagatcataagatattctttcattcttattaagacgatctagccataagacatatacttaagaaggtagtctgttcagtaggcaattcataagtctgttcacccaattattgcatacatactgtagcttgtatttgaatgaagatgatctcaccataggatactctactccattccaaatagattcaagttgtatgtgtcctaattaaaactatttctggtttcacagaaaagtgtgtcactttaatttcgttagtttcatcataaaatatattttttgtactgtactatagagatttgatgttgtatatattatcatttttctcgtctacaaactgggtcaaacgtagacaaggttgacacaggacaaacataagacttcgattaatttggaaccgagggagtggtatgtttaccagacaaatcctatgttcgtttattgaatcattagaattatgtactagctattagttggatcaagatgatacataaggttaaaaggtattagtataatcaggtgatccttaggctggtcttttttttttcttctgatggcttctttatgaaagatttgtattgcaatggtgtcgtggacacttgataagaaactgaaactggtttactttgctggcatctctagttgatcgttagctgactattttgctcttcagggaacaacggtggtggataacctgttgaacagtgaggatgtccactacatgctcgaggccctggacgcgctcgggctctccgtggaagcagacaaagttgcaaaaagagctctagtcgtcggctgtggcggcaggttcccgattgagaaggatgccaaggaggaagtaaagctcttcttgggcaacgctggaactgcgatgcggccattgacggcggctgtagtagctgctggtggaaatgcaacgtatgtttcttttctttaatccttattatgggaataagtatgagttccgtggttatgctttgagactgatggtttatgtctctcttctgaacttcagttatgttcttgatggagtaccaagaatgagggagcgacctatcggtgacttagttgtcggtttgaaacaactaggtgcgaatgttgattgtttcctcggcaccgactgcccacctgttcggatcaacggcattggagggctacctggtggcaaggttagcctcatcaacttcccttttatgcgcttttgtacacacatttcagttctctgaaaaaaacaagattatgcgacctttaaaatagccataaccattaggccctatttcgtgtaaaacagatatgctgattgtgttgtggtcttagatcacacggcctatcataaattagcacttaacattgaattgcattccacaggttaagctatctggttccatcagcagccagtacttgagttccttgctgatggctgctcctttggctcttggggatgttgagattgaaatcattgataaactaatctctgttccttatgttgaaatgacattgagattgatggagcgttttggcgtgacggcagagcattctgatagctgggacagattctacattaaaggaggacagaagtacaagtaagttttgaattgttctgcttattctaaacatttgtccaaacatttgacttctggataaactagggaattgaacattggaaagaactattgactgctcaacttactgttattagctaagtcaagctttactaggaaatgagtaactctgctacttacaatgcactggctgcacagctatgttttctggtgcataaactattgtctgcccaaataactttaatcatctggttaggaccaaacttgtagtagttatgaactgtacaaggaaatcagtgtgacaaatctccgctacttacaatgacattggacggttatattttcttgtgcataaacttggtcacatcagaagtgccatccatctaaaaaagggtgagaattgagaacatatgcagcttaatgacagctgtttggcaataagcatttcttttgcggatgattcttgatttgcttcttttagccttttttattgttactagttgaatgtccgtgcttcgccacggctccttagtgtatatttaatggcattcgtgttatacggataaagatactatgtatgtaaatattgaaagtactttttttggacccccttccggcatgttctattgtcttcatcgtcgaagccaaatgttacattgggatatctgctgccaaatgttgcagcaggatatgcatcctgattttactgagcatacttcactgatgtaattgaaactgtcagttcaaacttcataaaagttgcagtaatcgcttcctaaacaagccctcccttgctctggaattgacaattgacaggtcccctggaaatgcctatgtcgaaggtgatgcctcaagtgcgagctatttcttggctggcgctgcaatcactggaggaactgtgactgtccaaggttgcggcaccaccagtttgcaggtacaaccagttttaaccatttggttaagcatacttgcggtatataacataatcaaagatatactgctgtcaaccaaactgatttaagtggacattcatttatgaatctatataactacagtactgtaagtcggtttcttgtgctatctccctgacgatgattaatattgcagggtgatgtgaaatttgctgaggtactagaaatgatgggagcgaaagttacatggaccgacactagtgtaactgttactggtccaccacgtcagccctttggaaggaaacacctaaaagctgttgatgtcaacatgaacaaaatgcctgatgttgccatgactcttgccgttgttgccctttttgccgatggtccaactgctatcagagatggtaaaccctcttatgtgttgctgttgatttcttttggatggattccgctacagcacatgatttgttcctgacacttgtccattctcctctgtagttgcctcttggagagtgaaggaaaccgagagaatggtggcaatccggacggaactaacaaaggtagcacacctatctccacttcttatatttcagctcactgttgcactccccagtgcttagtctcacctgttgtgtgcctctgtgctatagctgggagcaacggtagaggaaggcccagactactgcattatcacaccaccagagaagctgaacgtcacggcaatcgacacctacgatgaccaccggatggcgatggccttctccctcgccgcctgcgctgaggtgcctgtcacgatcagggaccctgggtgcacccgcaagaccttccccaactactttgacgtgctaagcaccttcgtgaagaactagctcgatgaaaatctacagtgtatcgcatttgtacttttgtagcctgtccatggtccgaggaaatttttactgttttggtcttcttgcgaaatgatttatgagtgtaatactagttttgtagcatggcgtggggcttttgaggtaaaatgagttgtatgcatactgagttcgttttgaataagaagcaagttaggagtaccatagaccatactgtgacctacatgttcttccgtttccagaggtattatgttggctgctggtactcaagtgtgttcgaaaactactcgacagccatggaatttgggagatgccatttgggtatgtggatgcttgaggaagatcatcaaagcaaacaagaacaccagtcgatggtaaaacagtgcagcttgcaccaagaatgtttgcctatcagagtaaacaaaccagactcagcagatatgaaaaaaactcagcactgtgacactcgtgctaaaactaatttcatttaggccgtggagtaggccattgcatacttacgtattagagcatctctagtcgagtcctagagcatctctagtcgagtccccacaaacggcgccggatcgagcgcttgggggacgagttttgttcgtgccgtgtttggggtacatcgctccctagtcgcgtcccccaaacgccgtccccaatgaggaattcaaaatagtttgtgcatttaaaaaagatggtgttcgtcgaagtcgtcgcgatcaaagtacttggcgcgcgatcatattacaggccgacttgcacaaacatagatcctccagaacggtccacttgggacagtgtgccctacgccttcttcttcttttcctccggaccgggtcctggctcgtacgtcggggagtagaacatagcgttggggttgaagccgtcacgaggcagcgcatcctcgtaccgcggcaacaagtttggtgtcacgcacccgggagtggcggaggggccgtcgttgtagaacccggatgtcga

SEQ ID NO: 121 - DNA, 200 bp, Abutilon theophrasti
ttcagtttcattcagatcaaatctcaaaggaggtttttccaattcccggggtttgtgtttgaacagcaatggtaagttgggaacaatcaaggttcggccaggagtggtttctgcttcaacagcagccacggctgagaagccatccagcgcatccgaaattgtgcttcaaccaatcaatgaaatttcgggtactgttaaat

SEQ ID NO: 122 - DNA, 200 bp, Abutilon theophrasti
atttaacagtacccgaaatttcattgattggttgaagcacaatttcggatgcgctggatggcttctcagccgtggctgctgttgaagcagaaaccactcctggccgaaccttgattgttcccaacttaccattgctgttcaaacacaaaccccgggaattggaaaaacctcctttgagatttgatctgaatgaaactgaa

SEQ ID NO: 123 - DNA, 200 bp, Abutilon theophrasti
aatgaaatttcgggtactgttaaattacccggctctaaatcactctccaatcggattctgctcctagctgctctatccgagggaactactgtggttgacaatttgttgaatagcgacgatgttcatcacatgcttgtcgctttgggaaaacttggccttcgtgtggagcatgacagtgaaaagaaacgagccattgttga

SEQ ID NO: 124 - DNA, 200 bp, Abutilon theophrasti
tcaacaatggctcgtttcttttcactgtcatgctccacacgaaggccaagttttcccaaagcgacaagcatgtgatgaacatcgtcgctattcaacaaattgtcaaccacagtagttccctcggatagagcagctaggagcagaatccgattggagagtgatttagagccgggtaatttaacagtacccgaaatttcatt

SEQ ID NO: 125 - DNA, 200 bp, Abutilon theophrasti
gtgaaaagaaacgagccattgttgaaggctgcggtggtcaatttccagtagggaaaggggaaggtcaagaaattgagcttttcctcgggaatgctggaaccgcaatgcgacctcttactgctgctattaccgccgccggtggcaattcaagctacgtacttgatggtgtaccccgaatgagagagaggccaattggggac

SEQ ID NO: 126 - DNA, 200 bp, Abutilon theophrasti
gtccccaattggcctctctctcattcggggtacaccatcaagtacgtagcttgaattgccaccggcggcggtaatagcagcagtaagaggtcgcattgcggttccagcattcccgaggaaaagctcaatttcttgaccttcccctttccctactggaaattgaccaccgcagccttcaacaatggctcgtttcttttcac

SEQ ID NO: 127 - DNA, 200 bp, Abutilon theophrasti
aatgagagagaggccaattggggacttagttactggtcttaagcagctgggtgcagatgtcgattgtactcttggcacaaattgcccccctgtccgtataaatggaaagggtggtcttcctggaggaaaggtgaaactttcaggatctatcagtagtcaatacttgaccgctttactcatggcagctcctttggctcttg

SEQ ID NO: 128 - DNA, 200 bp, Abutilon theophrasti
caagagccaaaggagctgccatgagtaaagcggtcaagtattgactactgatagatcctgaaagtttcacctttcctccaggaagaccaccctttccatttatacggacaggggggcaatttgtgccaagagtacaatcgacatctgcacccagctgcttaagaccagtaactaagtccccaattggcctctctctcatt

SEQ ID NO: 129 - DNA, 200 bp, Abutilon theophrasti
ctcatggcagctcctttggctcttggggatgtggaaattgagattattgataaactgatttcaatcccatatgttgaaatgaccataaaattgatggaaaggtttggggtcagtgtggagcacagtaatagctgggatcgattctttatccgaggaggtcaaaagtacaagtctcctggaaatgcttacgtcgaaggtga

SEQ ID NO: 130 - DNA, 200 bp, Abutilon theophrasti
tcaccttcgacgtaagcatttccaggagacttgtacttttgacctcctcggataaagaatcgatcccagctattactgtgctccacactgaccccaaacctttccatcaattttatggtcatttcaacatatgggattgaaatcagtttatcaataatctcaatttccacatccccaagagccaaaggagctgccatgag

SEQ ID NO: 131 - DNA, 200 bp, Abutilon theophrasti
ctggaaatgcttacgtcgaaggtgacgcttcaagtgctagttacttccttgctggtgcagctgttactggtgggactgtcacagtagaaggatgtggaacaagtagtttgcagggtgatgtaaaattcgctgaggttcttgagatgatgggtgccaaagttacttggaccgagaacagtgtaaccgtcactggaccccca

SEQ ID NO: 132 - DNA, 200 bp, Abutilon theophrasti
tgggggtccagtgacggttacactgttctcggtccaagtaactttggcacccatcatctcaagaacctcagcgaattttacatcaccctgcaaactacttgttccacatccttctactgtgacagtcccaccagtaacagctgcaccagcaaggaagtaactagcacttgaagcgtcaccttcgacgtaagcatttccag

SEQ ID NO: 133 - DNA, 200 bp, Abutilon theophrasti
cagtgtaaccgtcactggacccccaagaaattcctttgggaggaagcaattgcgtgctattgatgtcaacatgaacaaaatgccagatgttgccatgactctcgctgttgttgccctttacgctgatggtcccactgccataagagatgtggcaagttggagggtgaaagagactgaaaggatgattgctatatgcacag

SEQ ID NO: 134 - DNA, 200 bp, Abutilon theophrasti
ctgtgcatatagcaatcatcctttcagtctctttcaccctccaacttgccacatctcttatggcagtgggaccatcagcgtaaagggcaacaacagcgagagtcatggcaacatctggcattttgttcatgttgacatcaatagcacgcaattgcttcctcccaaaggaatttcttgggggtccagtgacggttacactg

SEQ ID NO: 135 - DNA, 200 bp, Abutilon theophrasti
gaaaggatgattgctatatgcacagaactcaggaagctcggagcaacagttgaagaagggccagattattgcgtcatcactccaccggagaaattaaacgtgacagcaatagatacttatgatgatcaccgaatggccatggcattctctcttgccgcctgtgcagaggttccagttaccatcaatgatcctggttgtac

SEQ ID NO: 136 - DNA, 200 bp, Abutilon theophrasti
gtacaaccaggatcattgatggtaactggaacctctgcacaggcggcaagagagaatgccatggccattcggtgatcatcataagtatctattgctgtcacgtttaatttctccggtggagtgatgacgcaataatctggcccttcttcaactgttgctccgagcttcctgagttctgtgcatatagcaatcatcctttc

SEQ ID NO: 137 - DNA, 200 bp, Abutilon theophrasti
ttaccatcaatgatcctggttgtacccggaaaaccttccctgactactttgaagttctcgagagggttacaaagcattgaatggctcgttttacttcgttatacaagagaaagaaacaaagcatgagagataggttcgtaccactgttcttaaaatcaaaggctgaaatcagttgaaccttgtcttcaatgttgtctcct

SEQ ID NO: 138 - DNA, 200 bp, Abutilon theophrasti
aggagacaacattgaagacaaggttcaactgatttcagcctttgattttaagaacagtggtacgaacctatctctcatgctttgtttctttctcttgtataacgaagtaaaacgagccattcaatgctttgtaaccctctcgagaacttcaaagtagtcagggaaggttttccgggtacaaccaggatcattgatggtaa

SEQ ID NO: 139 - DNA, 200 bp, Agrobacterium tumefaciens
cacggtgcaagcagccggcccgcaaccgcccgcaaatcctctggcctttccggaaccgtccgcattcccggcgacaagtcgatctcccaccggtccttcatgttcggcggtctcgcgagcggtgaaacgcgcatcaccggccttctggaaggcgaggacgtcatcaatacgggcaaggccatgcaggccatgggcgccag

SEQ ID NO: 140 - DNA, 200 bp, Agrobacterium tumefaciens
ctggcgcccatggcctgcatggccttgcccgtattgatgacgtcctcgccttccagaaggccggtgatgcgcgtttcaccgctcgcgagaccgccgaacatgaaggaccggtgggagatcgacttgtcgccgggaatgcggacggttccggaaaggccagaggatttgcgggcggttgcgggccggctgcttgcaccgtg

SEQ ID NO: 141 - DNA, 200 bp, Agrobacterium tumefaciens
aggccatgcaggccatgggcgccaggatccgtaaggaaggcgacacctggatcatcgatggcgtcggcaatggcggcctcctggcgcctgaggcgccgctcgatttcggcaatgccgccacgggctgccgcctgaccatgggcctcgtcggggtctacgatttcgacagcaccttcatcggcgacgcctcgctcacaaag

SEQ ID NO: 142 - DNA, 200 bp, Agrobacterium tumefaciens
ctttgtgagcgaggcgtcgccgatgaaggtgctgtcgaaatcgtagaccccgacgaggcccatggtcaggcggcagcccgtggcggcattgccgaaatcgagcggcgcctcaggcgccaggaggccgccattgccgacgccatcgatgatccaggtgtcgccttccttacggatcctggcgcccatggcctgcatggcct

SEQ ID NO: 143 - DNA, 200 bp, Agrobacterium tumefaciens
catcggcgacgcctcgctcacaaagcgcccgatgggccgcgtgttgaacccgctgcgcgaaatgggcgtgcaggtgaaatcggaagacggtgaccgtcttcccgttaccttgcgcgggccgaagacgccgacgccgatcacctaccgcgtgccgatggcctccgcacaggtgaagtccgccgtgctgctcgccggcctca

SEQ ID NO: 144 - DNA, 200 bp, Agrobacterium tumefaciens
tgaggccggcgagcagcacggcggacttcacctgtgcggaggccatcggcacgcggtaggtgatcggcgtcggcgtcttcggcccgcgcaaggtaacgggaagacggtcaccgtcttccgatttcacctgcacgcccatttcgcgcagcgggttcaacacgcggcccatcgggcgctttgtgagcgaggcgtcgccgatg

SEQ ID NO: 145 - DNA, 200 bp, Agrobacterium tumefaciens
tccgccgtgctgctcgccggcctcaacacgcccggcatcacgacggtcatcgagccgatcatgacgcgcgatcatacggaaaagatgctgcagggctttggcgccaaccttaccgtcgagacggatgcggacggcgtgcgcaccatccgcctggaaggccgcggcaagctcaccggccaagtcatcgacgtgccgggcga

SEQ ID NO: 146 - DNA, 200 bp, Agrobacterium tumefaciens
tcgcccggcacgtcgatgacttggccggtgagcttgccgcggccttccaggcggatggtgcgcacgccgtccgcatccgtctcgacggtaaggttggcgccaaagccctgcagcatcttttccgtatgatcgcgcgtcatgatcggctcgatgaccgtcgtgatgccgggcgtgttgaggccggcgagcagcacggcgga

SEQ ID NO: 147 - DNA, 200 bp, Agrobacterium tumefaciens
gccaagtcatcgacgtgccgggcgacccgtcctcgacggccttcccgctggttgcggccctgcttgttccgggctccgacgtcaccatcctcaacgtgctgatgaaccccacccgcaccggcctcatcctgacgctgcaggaaatgggcgccgacatcgaagtcatcaacccgcgccttgccggcggcgaagacgtggcg

SEQ ID NO: 148 - DNA, 200 bp, Agrobacterium tumefaciens
cgccacgtcttcgccgccggcaaggcgcgggttgatgacttcgatgtcggcgcccatttcctgcagcgtcaggatgaggccggtgcgggtggggttcatcagcacgttgaggatggtgacgtcggagcccggaacaagcagggccgcaaccagcgggaaggccgtcgaggacgggtcgcccggcacgtcgatgacttggc

SEQ ID NO: 149 - DNA, 200 bp, Agrobacterium tumefaciens
ccttgccggcggcgaagacgtggcggacctgcgcgttcgctcctccacgctgaagggcgtcacggtgccggaagaccgcgcgccttcgatgatcgacgaatatccgattctcgctgtcgccgccgccttcgcggaaggggcgaccgtgatgaacggtctggaagaactccgcgtcaaggaaagcgaccgcctctcggccg

SEQ ID NO: 150 - DNA, 200 bp, Agrobacterium tumefaciens
cggccgagaggcggtcgctttccttgacgcggagttcttccagaccgttcatcacggtcgccccttccgcgaaggcggcggcgacagcgagaatcggatattcgtcgatcatcgaaggcgcgcggtcttccggcaccgtgacgcccttcagcgtggaggagcgaacgcgcaggtccgccacgtcttcgccgccggcaagg

SEQ ID NO: 151 - DNA, 200 bp, Agrobacterium tumefaciens
aaggaaagcgaccgcctctcggccgtcgccaatggcctcaagctcaatggcgtggattgcgatgagggcgagacgtcgctcgtcgtgcgtggccgccctgacggcaaggggctcggcaacgcctcgggcgccgccgtcgccacccatctcgatcaccgcatcgccatgagcttcctcgtcatgggcctcgtgtcggaaaa

SEQ ID NO: 152 - DNA, 200 bp, Agrobacterium tumefaciens
ttttccgacacgaggcccatgacgaggaagctcatggcgatgcggtgatcgagatgggtggcgacggcggcgcccgaggcgttgccgagccccttgccgtcagggcggccacgcacgacgagcgacgtctcgccctcatcgcaatccacgccattgagcttgaggccattggcgacggccgagaggcggtcgctttcctt

SEQ ID NO: 153 - DNA, 200 bp, Amaranthus graecizans
gagccaagaaacaacgcgaaattcagagataaagagaaagaataatggctcaagctactaccatcaacaatggtgtccaaactggtcaattgcaccatactttacccaaaacccacttacccaaatcttcaaaaactgttaattttggatcaaacttgagattttctccaaagttcatgtctttaaccaataaaagagtt

SEQ ID NO: 154 - DNA, 200 bp, Amaranthus graecizans
aactcttttattggttaaagacatgaactttggagaaaatctcaagtttgatccaaaattaacagtttttgaagatttgggtaagtgggttttgggtaaagtatggtgcaattgaccagtttggacaccattgttgatggtagtagcttgagccattattctttctctttatctctgaatttcgcgttgtttcttggctc

SEQ ID NO: 155 - DNA, 200 bp, Amaranthus graecizans
catgtctttaaccaataaaagagttggtgggcaatcatcaattgttcccaggattcaagctactgttgctgctgcatctgagaagccttcatctgccccagaaattgtgttacaacccatcaaagagatctccggtactgttcaattgcctgggtcaaagtctttatccaatcgaatccttcttttagctgctttgtctg

SEQ ID NO: 156 - DNA, 200 bp, Amaranthus graecizans
cagacaaagcagctaaaagaaggattcgattggataaagactttgacccaggcaattgaacagtaccggagatctctttgatgggttgtaacacaatttctggggcagatgaaggcttctcagatgcagcagcaacagtagcttgaatcctgggaacaattgatgattgcccaccaactcttttattggttaaagacatg

SEQ ID NO: 157 - DNA, 200 bp, Amaranthus graecizans
gcgcccattgacagctgcggttgccgttgctggaggaaattcaagttatgtgcttgatggagtaccaagaatgagggagcgccccattggggatctggtagcaggtctaaagcaacttggttcagatgttgactgttttcttggcacaaattgccctcctgttcgggtcaatgctaaaggaggccttccagggggcaagg

SEQ ID NO: 158 - DNA, 200 bp, Amaranthus graecizans
ccttgccccctggaaggcctcctttagcattgacccgaacaggagggcaatttgtgccaagaaaacagtcaacatctgaaccaagttgctttagacctgctaccagatccccaatggggcgctccctcattcttggtactccatcaagcacataacttgaatttcctccagcaacggcaaccgcagctgtcaatgggcgc

SEQ ID NO: 159 - DNA, 200 bp, Amaranthus graecizans
aaaggaggccttccagggggcaaggtcaagctctctggatcagttagtagccaatatttaactgcacttctcatggctactcctttgggtgttggagacgtggagattgagatagttgataaattgatttctgtaccgtatgttgaaatgacaataaggttgatggaacgctttggagtatctgttgaacatagtgatag

SEQ ID NO: 160 - DNA, 200 bp, Amaranthus graecizans
ctatcactatgttcaacagatactccaaagcgttccatcaaccttattgtcatttcaacatacggtacagaaatcaatttatcaactatctcaatctccacgtctccaacacccaaaggagtagccatgagaagtgcagttaaatattggctactaactgatccagagagcttgaccttgccccctggaaggcctccttt

SEQ ID NO: 161 - DNA, 200 bp, Amaranthus graecizans
gagtatctgttgaacatagtgatagttgggacaggttctacatccgaggtggtcagaaatacaaatctcccggaaaggcatatgttgagggtgatgcttcaagtgctagctactttctagcaggagccgccgtcactggtgggactgtgactgtaaagggttgtggaacaagcagtttacagggtgatgtaaaatttgct

SEQ ID NO: 162 - DNA, 200 bp, Amaranthus graecizans
agcaaattttacatcaccctgtaaactgcttgttccacaaccctttacagtcacagtcccaccagtgacggcggctcctgctagaaagtagctagcacttgaagcatcaccctcaacatatgcctttccgggagatttgtatttctgaccacctcggatgtagaacctgtcccaactatcactatgttcaacagatactc

SEQ ID NO: 163 - DNA, 200 bp, Amaranthus graecizans
tttacagggtgatgtaaaatttgctgaagttcttgaaaagatgggttgcaaggtcacctggacagagaatagcgtaactgttaccggaccacccagggattcatctggaagaaaacatctgcgcgctatcgacgtcaacatgaacaaaatgccagatgttgctatgactcttgcagttgttgccttgtatgcagatgggc

SEQ ID NO: 164 - DNA, 200 bp, Amaranthus graecizans
gcccatctgcatacaaggcaacaactgcaagagtcatagcaacatctggcattttgttcatgttgacgtcgatagcgcgcagatgttttcttccagatgaatccctgggtggtccggtaacagttacgctattctctgtccaggtgaccttgcaacccatcttttcaagaacttcagcaaattttacatcaccctgtaaa

SEQ ID NO: 165 - DNA, 200 bp, Amaranthus graecizans
gttgttgccttgtatgcagatgggcccaccgccatcagagatgtggctagctggagagtgaaggaaaccgaacggatgattgccatttgcacagaactgagaaagcttggggcaacagttgaggaaggatctgatttctgtgtgatcactccgcctgaaaagctaaatcctaccgccatcgaaacttatgacgatcaccg

SEQ ID NO: 166 - DNA, 200 bp, Amaranthus graecizans
cggtgatcgtcataagtttcgatggcggtaggatttagcttttcaggcggagtgatcacacagaaatcagatccttcctcaactgttgccccaagctttctcagttctgtgcaaatggcaatcatccgttcggtttccttcactctccagctagccacatctctgatggcggtgggcccatctgcatacaaggcaacaac

SEQ ID NO: 167 - DNA, 200 bp, Amaranthus hybridus
ctaagccctcgtctttcccttctctctctcttaaaatcttaaaatccacccaactttttcagccaacaaacaacgccaaattcagagaaagaataatggctcaagctactaccatcaacaatggtgtccaaactggtcaattgcaccatattttacccaaaacccacttacccaaatcttcaaaaactcttaattttgga

SEQ ID NO: 168 - DNA, 200 bp, Amaranthus hybridus
tccaaaattaagagtttttgaagatttgggtaagtgggttttgggtaaaatatggtgcaattgaccagtttggacaccattgttgatggtagtagcttgagccattattctttctctgaatttggcgttgtttgttggctgaaaaagttgggtggattttaagattttaagagagagagaagggaaagacgagggcttag

SEQ ID NO: 169 - DNA, 200 bp, Amaranthus hybridus
atcttcaaaaactcttaattttggatcaaacttgagaatttctccaaagttcatgtctttgaccaataaaagagttggtgggcaatcatcaattgttcccaagattcaagcttctgttgctgctgcagctgagaagccttcatctgtcccagaaattgttttacaacccatcaaagagatctctggtactgttcaattgc

SEQ ID NO: 170 - DNA, 200 bp, Amaranthus hybridus
gcaattgaacagtaccagagatctctttgatgggttgtaaaacaatttctgggacagatgaaggcttctcagctgcagcagcaacagaagcttgaatcttgggaacaattgatgattgcccaccaactcttttattggtcaaagacatgaactttggagaaattctcaagtttgatccaaaattaagagtttttgaagat

SEQ ID NO: 171 - DNA, 200 bp, Amaranthus hybridus
gagatctctggtactgttcaattgcctgggtcaaagtctttatccaatcgaatccttcttttagctgctttgtctgagggcacaacagtggtcgacaacttgctgtatagtgatgatattctttatatgttggatgctctcagaactcttggtttaaaagtggaggatgataatacagccaaaagggcagtcgtggaggg

SEQ ID NO: 172 - DNA, 200 bp, Amaranthus hybridus
ccctccacgactgcccttttggctgtattatcatcctccacttttaaaccaagagttctgagagcatccaacatataaagaatatcatcactatacagcaagttgtcgaccactgttgtgccctcagacaaagcagctaaaagaaggattcgattggataaagactttgacccaggcaattgaacagtaccagagatctc

SEQ ID NO: 173 - DNA, 200 bp, Amaranthus hybridus
cagccaaaagggcagtcgtggagggttgtggtggtctgtttcctgttggtaaagatggaaaggaagagattcaacttttccttggtaatgcaggaacagcgatgcgcccattgacagctgcggttgccgttgctggaggaaattctagttatgtgcttgatggagtgccaagaatgagggagcgccccattggggatctg

SEQ ID NO: 174 - DNA, 200 bp, Amaranthus hybridus
cagatccccaatggggcgctccctcattcttggcactccatcaagcacataactagaatttcctccagcaacggcaaccgcagctgtcaatgggcgcatcgctgttcctgcattaccaaggaaaagttgaatctcttcctttccatctttaccaacaggaaacagaccaccacaaccctccacgactgcccttttggctg

SEQ ID NO: 175 - DNA, 200 bp, Amaranthus hybridus
gagggagcgccccattggggatctggtagcaggtctaaagcaacttggttcagatgttgactgttttcttggcacaaattgccctcctgttcgggttaatgctaaaggaggccttccagggggcaaggtcaagctctctggatcggttagtagccaatatttaactgcacttctcatggctactcctttgggtcttggag

SEQ ID NO: 176 - DNA, 200 bp, Amaranthus hybridus
ctccaagacccaaaggagtagccatgagaagtgcagttaaatattggctactaaccgatccagagagcttgaccttgccccctggaaggcctcctttagcattaacccgaacaggagggcaatttgtgccaagaaaacagtcaacatctgaaccaagttgctttagacctgctaccagatccccaatggggcgctccctc

SEQ ID NO: 177 - DNA, 200 bp, Amaranthus hybridus
atggctactcctttgggtcttggagacgtggagattgagatagttgataaattgatttctgtaccgtatgttgaaatgacaataaggttgatggaacgctttggagtatctgtagaacatagtgatagttgggacaggttctacatacgaggtggtcaaaaatacaaatctcctggaaaggcatatgttgagggtgacgc

SEQ ID NO: 178 - DNA, 200 bp, Amaranthus hybridus
gcgtcaccctcaacatatgcctttccaggagatttgtatttttgaccacctcgtatgtagaacctgtcccaactatcactatgttctacagatactccaaagcgttccatcaaccttattgtcatttcaacatacggtacagaaatcaatttatcaactatctcaatctccacgtctccaagacccaaaggagtagccat

SEQ ID NO: 179 - DNA, 200 bp, Amaranthus hybridus
gaaaggcatatgttgagggtgacgcttcaagtgctagctacttcctagctggagccgccgtcactggtgggactgtgactgtcaagggttgtggaacaagcagtttacagggtgatgtaaaatttgccgaagttcttgagaagatgggctgcaaggtcacctggacagagaatagcgtaactgttacgggaccacccagg

SEQ ID NO: 180 - DNA, 200 bp, Amaranthus hybridus
cctgggtggtcccgtaacagttacgctattctctgtccaggtgaccttgcagcccatcttctcaagaacttcggcaaattttacatcaccctgtaaactgcttgttccacaacccttgacagtcacagtcccaccagtgacggcggctccagctaggaagtagctagcacttgaagcgtcaccctcaacatatgcctttc

SEQ ID NO: 181 - DNA, 200 bp, Amaranthus hybridus
cgtaactgttacgggaccacccagggattcatctggaaggaaacatctgcgcgctgtcgacgtcaacatgaacaaaatgccagatgttgctatgactcttgcagtagttgccttgtatgctgatgggcccactgccatcagagatgtggctagctggagagtgaaggaaaccgaacggatgattgccatttgcacagaac

SEQ ID NO: 182 - DNA, 200 bp, Amaranthus hybridus
gttctgtgcaaatggcaatcatccgttcggtttccttcactctccagctagccacatctctgatggcagtgggcccatcagcatacaaggcaactactgcaagagtcatagcaacatctggcattttgttcatgttgacgtcgacagcgcgcagatgtttccttccagatgaatccctgggtggtcccgtaacagttacg

SEQ ID NO: 183 - DNA, 200 bp, Amaranthus hybridus
cggatgattgccatttgcacagaactgagaaagcttggggcaacagttgaggaaggatctgattactgtgtgatcactccgcctgaaaagctaaatcccaccgccatcgaaacttatgacgatcaccgaatggccatggcattctctcttgctgcctgtgcagatgttcccgtcactatccttgatccgggatgcacccg

SEQ ID NO: 184 - DNA, 200 bp, Amaranthus hybridus
cgggtgcatcccggatcaaggatagtgacgggaacatctgcacaggcagcaagagagaatgccatggccattcggtgatcgtcataagtttcgatggcggtgggatttagcttttcaggcggagtgatcacacagtaatcagatccttcctcaactgttgccccaagctttctcagttctgtgcaaatggcaatcatccg

SEQ ID NO: 185 - DNA, 200 bp, Amaranthus lividus
gagggttgtggtggtctgtttcctgtttggtaaagatggaaaggaagagattcaacttttccttggtaatgcaggaacagcgatgcgcccattgacagctgcggttgccgttgctggaggaaattctagttatgtgcttgatggagtgccaagaatgagggagcgccccattggggatctggtagcaggtctaaagcaac

SEQ ID NO: 186 - DNA, 200 bp, Amaranthus lividus
gttgctttagacctgctaccagatccccaatggggcgctccctcattcttggcactccatcaagcacataactagaatttcctccagcaacggcaaccgcagctgtcaatgggcgcatcgctgttcctgcattaccaaggaaaagttgaatctcttcctttccatctttaccaaacaggaaacagaccaccacaaccctc

SEQ ID NO: 187 - DNA, 200 bp, Amaranthus lividus
gatctggtagcaggtctaaagcaacttggttcagatgttgactgttttcttggcacaaattgccctcctgttcgggttaatgctaaaggaggccttccagggggcaaggtcaagctctctggatcggttagtagccaatatttaactgcacttctcatggctactcctttgggtcttggagacgtggagattgagatagt

SEQ ID NO: 188 - DNA, 200 bp, Amaranthus lividus
actatctcaatctccacgtctccaagacccaaaggagtagccatgagaagtgcagttaaatattggctactaaccgatccagagagcttgaccttgccccctggaaggcctcctttagcattaacccgaacaggagggcaatttgtgccaagaaaacagtcaacatctgaaccaagttgctttagacctgctaccagatc

SEQ ID NO: 189 - DNA, 200 bp, Amaranthus lividus
ttggagacgtggagattgagatagttgataaattgatttctgtaccgtatgttgaaatgacaataaggttgatggaacgctttggagtatctgtagaacatagtgatagttgggacaggttctacatacgaggtggtcaaaaatacaaatctcctggaaaggcatatgttgagggtgacgcttcaagtgctagctacttc

SEQ ID NO: 190 - DNA, 200 bp, Amaranthus lividus
gaagtagctagcacttgaagcgtcaccctcaacatatgcctttccaggagatttgtatttttgaccacctcgtatgtagaacctgtcccaactatcactatgttctacagatactccaaagcgttccatcaaccttattgtcatttcaacatacggtacagaaatcaatttatcaactatctcaatctccacgtctccaa

SEQ ID NO: 191 - DNA, 200 bp, Amaranthus lividus
tgacgcttcaagtgctagctacttcctagctggagccgccgtcactggtgggactgtgactgtcaagggttgtggaacaagcagtttacagggtgatgtaaaatttgccgaagttcttgagaagatgggctgcaaggtcacctggacagagaatagcgtaactgttacgggaccacccagggattcatctggaaggaaac

SEQ ID NO: 192 - DNA, 200 bp, Amaranthus lividus
gtttccttccagatgaatccctgggtggtcccgtaacagttacgctattctctgtccaggtgaccttgcagcccatcttctcaagaacttcggcaaattttacatcaccctgtaaactgcttgttccacaacccttgacagtcacagtcccaccagtgacggcggctccagctaggaagtagctagcacttgaagcgtca

SEQ ID NO: 193 - DNA, 200 bp, Amaranthus palmeri
aaactttggtttggtaagaactaagccctcttctttcccttctctctcttaaaagcctaaaatccacctaactttttcagccaacaaacaacgccaaattcagagaaagaataatggctcaagctactaccatcaacaatggtgtccatactggtcaattgcaccatactttacccaaaacccacttacccaaatcttca

SEQ ID NO: 194 - DNA, 200 bp, Amaranthus palmeri
tgaagatttgggtaagtgggttttgggtaaagtatggtgcaattgaccagtatggacaccattgttgatggtagtagcttgagccattattctttctctgaatttggcgttgtttgttggctgaaaaagttaggtggattttaggcttttaagagagagaagggaaagaagagggcttagttcttaccaaaccaaagttt

SEQ ID NO: 195 - DNA, 200 bp, Amaranthus palmeri
caaaacccacttacccaaatcttcaaaaactcttaattttggatcaaacttgagaatttctccaaagttcatgtctttaaccaataaaagagttggtgggcaatcatcaattgttcccaagattcaagcttctgttgctgctgcagctgagaaaccttcatctgtcccagaaattgtgttacaacccatcaaagagatct

SEQ ID NO: 196 - DNA, 200 bp, Amaranthus palmeri
agatctctttgatgggttgtaacacaatttctgggacagatgaaggtttctcagctgcagcagcaacagaagcttgaatcttgggaacaattgatgattgcccaccaactcttttattggttaaagacatgaactttggagaaattctcaagtttgatccaaaattaagagtttttgaagatttgggtaagtgggttttg

SEQ ID NO: 197 - DNA, 200 bp, Amaranthus palmeri
gtgttacaacccatcaaagagatctctggtactgttcaattgcctgggtcaaagtctttatccaatcgaatccttcttttagctgctttgtctgagggcacaacagtggtcgacaacttgctgtatagtgatgatattctttatatgttggacgctctcagaactcttggtttaaaagtggaggatgatagtacagccaa

SEQ ID NO: 198 - DNA, 200 bp, Amaranthus palmeri
ttggctgtactatcatcctccacttttaaaccaagagttctgagagcgtccaacatataaagaatatcatcactatacagcaagttgtcgaccactgttgtgccctcagacaaagcagctaaaagaaggattcgattggataaagactttgacccaggcaattgaacagtaccagagatctctttgatgggttgtaacac

SEQ ID NO: 199 - DNA, 200 bp, Amaranthus palmeri
aagtggaggatgatagtacagccaaaagggcagtcgtagagggttgtggtggtctgtttcctgttggtaaagatggaaaggaagagattcaacttttccttggtaatgcaggaacagcgatgcgcccattgacagctgcggttgccgttgctggaggaaattcaagttatgtgcttgatggagtaccaagaatgagggag

SEQ ID NO: 200 - DNA, 200 bp, Amaranthus palmeri
ctccctcattcttggtactccatcaagcacataacttgaatttcctccagcaacggcaaccgcagctgtcaatgggcgcatcgctgttcctgcattaccaaggaaaagttgaatctcttcctttccatctttaccaacaggaaacagaccaccacaaccctctacgactgcccttttggctgtactatcatcctccactt

SEQ ID NO: 201 - DNA, 200 bp, Amaranthus palmeri
tgatggagtaccaagaatgagggagcgccccattggggatctggtagcaggtctaaagcaacttggttcagatgtagattgttttcttggcacaaattgccctcctgttcgggtcaatgctaaaggaggccttccagggggcaaggtcaagctctctggatcggttagtagccaatatttaactgcacttctcatggcta

SEQ ID NO: 202 - DNA, 200 bp, Amaranthus palmeri
tagccatgagaagtgcagttaaatattggctactaaccgatccagagagcttgaccttgccccctggaaggcctcctttagcattgacccgaacaggagggcaatttgtgccaagaaaacaatctacatctgaaccaagttgctttagacctgctaccagatccccaatggggcgctccctcattcttggtactccatca

SEQ ID NO: 203 - DNA, 200 bp, Amaranthus palmeri
tatttaactgcacttctcatggctactcctttgggtcttggagacgtggagattgagatagttgataaattgatttctgtaccgtatgttgaaatgacaataaggttgatggaacgctttggagtatccgtagaacatagtgatagttgggacaggttctacattcgaggtggtcagaaatacaaatctcctggaaaggc

SEQ ID NO: 204 - DNA, 200 bp, Amaranthus palmeri
gcctttccaggagatttgtatttctgaccacctcgaatgtagaacctgtcccaactatcactatgttctacggatactccaaagcgttccatcaaccttattgtcatttcaacatacggtacagaaatcaatttatcaactatctcaatctccacgtctccaagacccaaaggagtagccatgagaagtgcagttaaata

SEQ ID NO: 205 - DNA, 200 bp, Amaranthus palmeri
agaaatacaaatctcctggaaaggcatatgtagagggggacgcttctagtgctagctacttcctagcaggagccgccgtcactggtgggactgtgactgtcaagggttgtggaacaagcagtttacagggtgatgtaaaatttgccgaagttcttgagaagatgggttgcaaggtcacctggacagagaatagtgtaact

SEQ ID NO: 206 - DNA, 200 bp, Amaranthus palmeri
agttacactattctctgtccaggtgaccttgcaacccatcttctcaagaacttcggcaaattttacatcaccctgtaaactgcttgttccacaacccttgacagtcacagtcccaccagtgacggcggctcctgctaggaagtagctagcactagaagcgtccccctctacatatgcctttccaggagatttgtatttct

SEQ ID NO: 207 - DNA, 200 bp, Amaranthus palmeri
cacctggacagagaatagtgtaactgttactggaccacccagggattcatctggaaggaaacatctgcgtgctatcgacgtcaacatgaacaaaatgccagatgttgctatgactcttgcagttgttgccttgtatgcagatgggcccaccgccatcagagatgtggctagctggagagtgaaggaaaccgaacggatga

SEQ ID NO: 208 - DNA, 200 bp, Amaranthus palmeri
tcatccgttcggtttccttcactctccagctagccacatctctgatggcggtgggcccatctgcatacaaggcaacaactgcaagagtcatagcaacatctggcattttgttcatgttgacgtcgatagcacgcagatgtttccttccagatgaatccctgggtggtccagtaacagttacactattctctgtccaggtg

SEQ ID NO: 209 - DNA, 200 bp, Amaranthus palmeri
agagtgaaggaaaccgaacggatgattgccatttgcacagaactgagaaagcttggggcaacagttgaggaaggatctgattactgtgtgatcactccgcctgaaaagctaaaccccaccgccattgaaacttatgacgatcaccgaatggccatggcattctctcttgctgcctgtgcagatgttcccgtcactatcct

SEQ ID NO: 210 - DNA, 200 bp, Amaranthus palmeri
aggatagtgacgggaacatctgcacaggcagcaagagagaatgccatggccattcggtgatcgtcataagtttcaatggcggtggggtttagcttttcaggcggagtgatcacacagtaatcagatccttcctcaactgttgccccaagctttctcagttctgtgcaaatggcaatcatccgttcggtttccttcactct

SEQ ID NO: 211 - DNA, 200 bp, Amaranthus palmeri
gtgcagatgttcccgtcactatccttgatccgggatgcacccgtaaaaccttcccggactactttgatgttttagaaaagttcgccaagcattgagtagctatatacgagatccttaaattgtacgccgaaggttttgatttgagtctaatagtagataaaaggctataaataaactggctttctgcttgagtaattatg

SEQ ID NO: 212 - DNA, 200 bp, Amaranthus palmeri
cataattactcaagcagaaagccagtttatttatagccttttatctactattagactcaaatcaaaaccttcggcgtacaatttaaggatctcgtatatagctactcaatgcttggcgaacttttctaaaacatcaaagtagtccgggaaggttttacgggtgcatcccggatcaaggatagtgacgggaacatctgcac

SEQ ID NO: 213 - DNA, 38 bp, Amaranthus palmeri; identical to SEQ ID NO: 11

SEQ ID NO: 214 - DNA, 38 bp, Amaranthus palmeri
tataagaaatttgtaatagtgacatttaaattaaatat

SEQ ID NO: 215 - DNA, 200 bp, Amaranthus palmeri
atggctcaagctactaccatcaacaatggtgtccatactggtcaattgcaccatactttacccaaaacccagttacccaaatcttcaaaaactcttaattttggatcaaacttgagaatttctccaaagttcatgtctttaaccaataaaagagttggtgggcaatcatcaattgttcccaagattcaagcttctgttgc

SEQ ID NO: 216 - DNA, 200 bp, Amaranthus palmeri
gcaacagaagcttgaatcttgggaacaattgatgattgcccaccaactcttttattggttaaagacatgaactttggagaaattctcaagtttgatccaaaattaagagtttttgaagatttgggtaactgggttttgggtaaagtatggtgcaattgaccagtatggacaccattgttgatggtagtagcttgagccat

SEQ ID NO: 217 - DNA, 200 bp, Amaranthus palmeri
ttcccaagattcaagcttctgttgctgctgcagctgagaaaccttcatctgtcccagaaattgtgttacaacccatcaaagagatctctggtactgttcaattgcctgggtcaaagtctttatccaatcgaatccttcttttagctgctttgtctgagggcacaacagtggtcgacaacttgctgtatagtgatgatatt

SEQ ID NO: 218 - DNA, 200 bp, Amaranthus palmeri
aatatcatcactatacagcaagttgtcgaccactgttgtgccctcagacaaagcagctaaaagaaggattcgattggataaagactttgacccaggcaattgaacagtaccagagatctctttgatgggttgtaacacaatttctgggacagatgaaggtttctcagctgcagcagcaacagaagcttgaatcttgggaa

SEQ ID NO: 219 - DNA, 200 bp, Amaranthus palmeri
caacttgctgtatagtgatgatattctttatatgttggacgctctcagaactcttggtttaaaagtggaggatgatagtacagccaaaagggcagtcgtagagggttgtggtggtctgtttcctgttggtaaagatggaaaggaagagattcaacttttccttggtaatgcaggaacagcgatgcgcccattgacagctg

SEQ ID NO: 220 - DNA, 200 bp, Amaranthus palmeri
cagctgtcaatgggcgcatcgctgttcctgcattaccaaggaaaagttgaatctcttcctttccatctttaccaacaggaaacagaccaccacaaccctctacgactgcccttttggctgtactatcatcctccacttttaaaccaagagttctgagagcgtccaacatataaagaatatcatcactatacagcaagttg

SEQ ID NO: 221 - DNA, 200 bp, Amaranthus palmeri
acagcgatgcgcccattgacagctgcggttgccgttgctggaggaaattcaagttatgtgcttgatggagtaccaagaatgagggagcgccccattggggatctggtagcaggtctaaagcaacttggttcagatgtagattgttttcttggcacaaattgccctcctgttcgggtcaatgctaaaggaggccttccagg

SEQ ID NO: 222 - DNA, 200 bp, Amaranthus palmeri
cctggaaggcctcctttagcattgacccgaacaggagggcaatttgtgccaagaaaacaatctacatctgaaccaagttgctttagacctgctaccagatccccaatggggcgctccctcattcttggtactccatcaagcacataacttgaatttcctccagcaacggcaaccgcagctgtcaatgggcgcatcgctgt

SEQ ID NO: 223 - DNA, 200 bp, Amaranthus palmeri
tcaatgctaaaggaggccttccagggggcaaggtcaagctctctggatcggttagtagccaatatttaactgcacttctcatggctactcctttgggtcttggagacgtggagattgagatagttgataaattgatttctgtaccgtatgttgaaatgacaataaagttgatggaacgctttggagtatccgtagaacat

SEQ ID NO: 224 - DNA, 200 bp, Amaranthus palmeri
atgttctacggatactccaaagcgttccatcaactttattgtcatttcaacatacggtacagaaatcaatttatcaactatctcaatctccacgtctccaagacccaaaggagtagccatgagaagtgcagttaaatattggctactaaccgatccagagagcttgaccttgccccctggaaggcctcctttagcattga

SEQ ID NO: 225 - DNA, 200 bp, Amaranthus palmeri
acgctttggagtatccgtagaacatagtgatagttgggacaggttctacattcgaggtggtcagaaatacaaatctcctggaaaggcatatgttgagggtgatgcttcaagtgctagctacttcctagccggagccgccgtcactggtgggactgtcactgtcaagggttgtggaacaagcagtttacagggtgatgtaa

SEQ ID NO: 226 - DNA, 200 bp, Amaranthus palmeri
ttacatcaccctgtaaactgcttgttccacaacccttgacagtgacagtcccaccagtgacggcggctccggctaggaagtagctagcacttgaagcatcaccctcaacatatgcctttccaggagatttgtatttctgaccacctcgaatgtagaacctgtcccaactatcactatgttctacggatactccaaagcgt

SEQ ID NO: 227 - DNA, 200 bp, Amaranthus palmeri
acaagcagtttacagggtgatgtaaaatttgccgaagttcttgagaagatgggttgcaaggtcacctggacagagaatagtgtaactgttactggaccacccagggattcatctggaaagaaacatctgcgtgctatcgacgtcaacatgaacaaaatgccagatgttgctatgactcttgcagttgttgccttgtatgc

SEQ ID NO: 228 - DNA, 200 bp, Amaranthus palmeri
gcatacaaggcaacaactgcaagagtcatagcaacatctggcattttgttcatgttgacgtcgatagcacgcagatgtttctttccagatgaatccctgggtggtccagtaacagttacactattctctgtccaggtgaccttgcaacccatcttctcaagaacttcggcaaattttacatcaccctgtaaactgcttgt

SEQ ID NO: 229 - DNA, 200 bp, Amaranthus palmeri
ctcttgcagttgttgccttgtatgcagatgggcccaccgccatcagagatgtggctagctggagagtgaaggaaaccgaacggatgattgccatttgcacagaactgagaaagcttggggcaacagttgaggaaggatctgattactgtgtgatcactccgcctgaaaagctaaaccccaccgccattgaaacttatgac

SEQ ID NO: 230 - DNA, 200 bp, Amaranthus palmeri
gtcataagtttcaatggcggtggggtttagcttttcaggcggagtgatcacacagtaatcagatccttcctcaactgttgccccaagctttctcagttctgtgcaaatggcaatcatccgttcggtttccttcactctccagctagccacatctctgatggcggtgggcccatctgcatacaaggcaacaactgcaagag

SEQ ID NO: 231 - DNA, 200 bp, Amaranthus palmeri
cccaaatgaaatttgacctattttagtaggttatcttcttcaatgtcttcttcaatgcctctttataaacccagctactgatttgtatcccacaagccattgttcttcttcaatttattccactttgttcttcaatcttcacctttcttcttccattgtgttcttccttcttcactattaaccctacgcaagccctcttc

SEQ ID NO: 232 - DNA, 200 bp, Amaranthus palmeri
gaagagggcttgcgtagggttaatagtgaagaaggaagaacacaatggaagaagaaaggtgaagattgaagaacaaagtggaataaattgaagaagaacaatggcttgtgggatacaaatcagtagctgggtttataaagaggcattgaagaagacattgaagaagataacctactaaaataggtcaaatttcatttggg

SEQ ID NO: 233 - DNA, 200 bp, Amaranthus palmeri
tattaaccctacgcaagccctcttcaaatgtattacaattttgaatcaaataatacaattgatgctcataattaacaccaagactagtgaccaccaaatcattaagatcaaaccatgaaatgcaatcaggatcaagtgaaaggcttctatattccccacccacataattcaaccctaccccagtccttttgaatttaccc

SEQ ID NO: 234 - DNA, 200 bp, Amaranthus palmeri
gggtaaattcaaaaggactggggtagggttgaattatgtgggtggggaatatagaagcctttcacttgatcctgattgcatttcatggtttgatcttaatgatttggtggtcactagtcttggtgttaattatgagcatcaattgtattatttgattcaaaattgtaatacatttgaagagggcttgcgtagggttaata

SEQ ID NO: 235 - DNA, 200 bp, Amaranthus palmeri
taccccagtccttttgaatttacccccataccaaaacatcacttgaaatttttcaaaattattaacctaaaaaaacaacacaattgaacataattaccaatgcatttctataacaacaaagaaaacattaaagaatcaaagattaaagtgaggaatggcaaagaaattaccatggtttgattgagaacaagaagacccaa

SEQ ID NO: 236 - DNA, 200 bp, Amaranthus palmeri
ttgggtcttcttgttctcaatcaaaccatggtaatttctttgccattcctcactttaatctttgattctttaatgttttctttgttgttatagaaatgcattggtaattatgttcaattgtgttgtttttttaggttaataattttgaaaaatttcaagtgatgttttggtatgggggtaaattcaaaaggactggggta

SEQ ID NO: 237 - DNA, 200 bp, Amaranthus palmeri
tttgattgagaacaagaagacccaaaattcgtctgcacagccccaaaattttcgcacagagcagcaataccacccccaaaattcgacactgttgataaaaaataaaccctaatttttttgggaaattacagttgatgaatgtgagtgttgattatggcgtgaagcttgatgattatgaatgacaattgtgcttcaagttt

SEQ ID NO: 238 - DNA, 200 bp, Amaranthus palmeri
aaacttgaagcacaattgtcattcataatcatcaagcttcacgccataatcaacactcacattcatcaactgtaatttcccaaaaaaattagggtttattttttatcaacagtgtcgaattttgggggtggtattgctgctctgtgcgaaaattttggggctgtgcagacgaattttgggtcttcttgttctcaatcaaa

SEQ ID NO: 239 - DNA, 200 bp, Amaranthus palmeri
tgaatgacaattgtgcttcaagtttttgaaattttgaagttttgaaggaagatggtgtgaaggaatggtagaacaggaaatgaagttaagggtatgcctttttgggttgaatgtttattttatggaattaaagaatatgaaagatcatactctaacctgcaatagtaggtcaaatttcatttgggggtgccacgagcaaa

SEQ ID NO: 240 - DNA, 200 bp, Amaranthus palmeri
tttgctcgtggcacccccaaatgaaatttgacctactattgcaggttagagtatgatctttcatattctttaattccataaaataaacattcaacccaaaaaggcatacccttaacttcatttcctgttctaccattccttcacaccatcttccttcaaaacttcaaaatttcaaaaacttgaagcacaattgtcattca

SEQ ID NO: 241 - DNA, 200 bp, Amaranthus palmeri
ttcatttgggggtgccacgagcaaatacacttgaaaggtgagattattcataaataatcaatacttgggattattcacataggtttgcgaatagttcggattattcccaacaatttttccttaagattataattaaaaaatccccaaaagatgaaaaaaagagaaagcatgtaaaacacgcgaatcagaccggtccactc

SEQ ID NO: 242 - DNA, 200 bp, Amaranthus palmeri
gagtggaccggtctgattcgcgtgttttacatgctttctctttttttcatcttttggggattttttaattataatcttaaggaaaaattgttgggaataatccgaactattcgcaaacctatgtgaataatcccaagtattgattatttatgaataatctcacctttcaagtgtatttgctcgtggcacccccaaatgaa

SEQ ID NO: 243 - DNA, 200 bp, Amaranthus palmeri
acacgcgaatcagaccggtccactcttgttttaatttgagacaattttgatgttgagtcatcccacaccaaccccaaaaaattcaacaacaaactcttataatgattccctctactctactagagtctacaccaacccactttctctttgcccaccaaaactttggtttggtaagaactaagccctcttctttcccttct

SEQ ID NO: 244 - DNA, 200 bp, Amaranthus palmeri
agaagggaaagaagagggcttagttcttaccaaaccaaagttttggtgggcaaagagaaagtgggttggtgtagactctagtagagtagagggaatcattataagagtttgttgttgaattttttggggttggtgtgggatgactcaacatcaaaattgtctcaaattaaaacaagagtggaccggtctgattcgcgtgt

SEQ ID NO: 245 - DNA, 200 bp, Amaranthus palmeri
aactaagccctcttctttcccttctctctcttaaaagcctaaaatccacctaactttttcagccaacaaacaacgccaaattcagaggaagaataatggctcaagctactaccatcaacaatggtgtccatactggtcaattgcaccatactttacccaaaacccagttacccaaatcttcaaaaactcttaattttgga

SEQ ID NO: 246 - DNA, 200 bp, Amaranthus palmeri
tccaaaattaagagtttttgaagatttgggtaactgggttttgggtaaagtatggtgcaattgaccagtatggacaccattgttgatggtagtagcttgagccattattcttcctctgaatttggcgttgtttgttggctgaaaaagttaggtggattttaggcttttaagagagagaagggaaagaagagggcttagtt

SEQ ID NO: 247 - DNA, 200 bp, Amaranthus palmeri
atcttcaaaaactcttaattttggatcaaacttgagaatttctccaaagttcatgtctttaaccaataaaagagttggtgggcaatcatcaattgttcccaagattcaagcttctgttgctgctgcagctgagaaaccttcatctgtcccagaaattgtgttacaacccatcaaagagatctctggtactgttcaattgc

SEQ ID NO: 248 - DNA, 200 bp, Amaranthus palmeri
gcaattgaacagtaccagagatctctttgatgggttgtaacacaatttctgggacagatgaaggtttctcagctgcagcagcaacagaagcttgaatcttgggaacaattgatgattgcccaccaactcttttattggttaaagacatgaactttggagaaattctcaagtttgatccaaaattaagagtttttgaagat

SEQ ID NO: 249 - DNA, 200 bp, Amaranthus palmeri
gagatctctggtactgttcaattgcctgggtcaaagtctttatccaatcgaatccttcttttagctgctttgtctgaggtatttatttctcaactgcgaaaacaatctctatttgatattggaatttatattacatactccatcttgttgtaattgcattagtacatacttatgttttgacctttgttcgtttgtttgtt

SEQ ID NO: 250 - DNA, 200 bp, Amaranthus palmeri
aacaaacaaacgaacaaaggtcaaaacataagtatgtactaatgcaattacaacaagatggagtatgtaatataaattccaatatcaaatagagattgttttcgcagttgagaaataaatacctcagacaaagcagctaaaagaaggattcgattggataaagactttgacccaggcaattgaacagtaccagagatctc

SEQ ID NO: 251 - DNA, 200 bp, Amaranthus palmeri
tttgacctttgttcgtttgtttgttgaattggtagtgttgagaatttgaatctaattatttgtttttccatgtgaatttaatctgattaaatccacttcttatttatgttaagttgcaatgatgtttgccaaacggttatcattgaaggataagttcgcctacttttgaccctcccaacttcgcgttggtagagccattt

SEQ ID NO: 252 - DNA, 200 bp, Amaranthus palmeri
aaatggctctaccaacgcgaagttgggagggtcaaaagtaggcgaacttatccttcaatgataaccgtttggcaaacatcattgcaacttaacataaataagaagtggatttaatcagattaaattcacatggaaaaacaaataattagattcaaattctcaacactaccaattcaacaaacaaacgaacaaaggtcaaa

SEQ ID NO: 253 - DNA, 200 bp, Amaranthus palmeri
caacttcgcgttggtagagccattttatgttattgggggaaagtagaaagatttatttgttttgccattcgaaatagtagcgttcgtgattctgatttgggtgtctttatagatatgatatatgggttattcatgtaatgtgtaggtttatgcattatgttggatgcatgtctggtgttattgctgtaaatggatgaatg

SEQ ID NO: 254 - DNA, 200 bp, Amaranthus palmeri
cattcatccatttacagcaataacaccagacatgcatccaacataatgcataaacctacacattacatgaataacccatatatcatatctataaagacacccaaatcagaatcacgaacgctactatttcgaatggcaaaacaaataaatctttctactttcccccaataacataaaatggctctaccaacgcgaagttg

SEQ ID NO: 255 - DNA, 200 bp, Amaranthus palmeri
tgttattgctgtaaatggatgaatgttgttatttggagacattttttcattcattttttccctttttaattggaactggaagagggaaagttattgggagtaattaaaaggttgtgagttcgatacactgcatcaaagacgaagaacttgacatagatgttgaaggctaatccttatcactgcttgaattcaatatgtat

SEQ ID NO: 256 - DNA, 200 bp, Amaranthus palmeri
atacatattgaattcaagcagtgataaggattagccttcaacatctatgtcaagttcttcgtctttgatgcagtgtatcgaactcacaaccttttaattactcccaataactttccctcttccagttccaattaaaaagggaaaaaatgaatgaaaaaatgtctccaaataacaacattcatccatttacagcaataaca

SEQ ID NO: 257 - DNA, 200 bp, Amaranthus palmeri
atcactgcttgaattcaatatgtatctgaaaattttacccctctatatgcatctgtttttgctaataaagtgtttttggactatcatgttttgtgatgcttaagagggtgatattactgagataaatggaaatatcaaaataacatctattgtgaagtagttttagaggcttttgattggtgcttcgactttggatttac

SEQ ID NO: 258 - DNA, 200 bp, Amaranthus palmeri
gtaaatccaaagtcgaagcaccaatcaaaagcctctaaaactacttcacaatagatgttattttgatatttccatttatctcagtaatatcaccctcttaagcatcacaaaacatgatagtccaaaaacactttattagcaaaaacagatgcatatagaggggtaaaattttcagatacatattgaattcaagcagtgat

SEQ ID NO: 259 - DNA, 200 bp, Amaranthus palmeri
attggtgcttcgactttggatttacttgcatcctagattgactcagtttgtgcaatctgaaaatgatttcatcatggtatgaatatggttcaaaaacaaggctgcatctcatcgaacacgttgtaaagatttaaaattaatcaaattgatatttctagcattgtaaaggcttaaaaaactgtatctcaggctatattagg

SEQ ID NO: 260 - DNA, 200 bp, Amaranthus palmeri
cctaatatagcctgagatacagttttttaagcctttacaatgctagaaatatcaatttgattaattttaaatctttacaacgtgttcgatgagatgcagccttgtttttgaaccatattcataccatgatgaaatcattttcagattgcacaaactgagtcaatctaggatgcaagtaaatccaaagtcgaagcaccaat

SEQ ID NO: 261 - DNA, 200 bp, Amaranthus palmeri
aaactgtatctcaggctatattagggattctcatgctcttgaccgatatttaggtgttacgataaccacatcactcctacgatcgttaccagatgtttgcactttgttatgtgttacaagagataagtgttgcatgcagtggatcccttgtgattttgttctaggtagacagtgttgtttttgaatttcaaagcaggaat

SEQ ID NO: 262 - DNA, 200 bp, Amaranthus palmeri
attcctgctttgaaattcaaaaacaacactgtctacctagaacaaaatcacaagggatccactgcatgcaacacttatctcttgtaacacataacaaagtgcaaacatctggtaacgatcgtaggagtgatgtggttatcgtaacacctaaatatcggtcaagagcatgagaatccctaatatagcctgagatacagttt

SEQ ID NO: 263 - DNA, 200 bp, Amaranthus palmeri
tgtttttgaatttcaaagcaggaattataacgagatttgatattagggtttgaatttttttaaaagttttttgcattcctccgatttgcaacacggtttacctactgtttatttgaattttttgtgtgagaaaaggcttacaggcttgctcttgtatatgtgtatgtatttgctttgtggttaaatatgctgcatgttgt

SEQ ID NO: 264 - DNA, 200 bp, Amaranthus palmeri
acaacatgcagcatatttaaccacaaagcaaatacatacacatatacaagagcaagcctgtaagccttttctcacacaaaaaattcaaataaacagtaggtaaaccgtgttgcaaatcggaggaatgcaaaaaacttttaaaaaaattcaaaccctaatatcaaatctcgttataattcctgctttgaaattcaaaaaca

SEQ ID NO: 265 - DNA, 200 bp, Amaranthus palmeri
tgtggttaaatatgctgcatgttgtaatgaaaactctgcccggggatggtgggcttacacgccaaagaaaaagattgttttccacaactaaaaatatcccattggcaacagcgtgcaattatttagggaatggtgttagagcattaaaattggaaaataaatgagctctcattttgttcaaaccatgagaattttcccct

SEQ ID NO: 266 - DNA, 200 bp, Amaranthus palmeri
aggggaaaattctcatggtttgaacaaaatgagagctcatttattttccaattttaatgctctaacaccattccctaaataattgcacgctgttgccaatgggatatttttagttgtggaaaacaatctttttctttggcgtgtaagcccaccatccccgggcagagttttcattacaacatgcagcatatttaaccaca

SEQ ID NO: 267 - DNA, 200 bp, Amaranthus palmeri
gttcaaaccatgagaattttcccctggtccaatattcagcgttttgtttcatttgtaaaaattacgatcatatttctctttagtgaagcaactgattggaaaactttggtatatgccatgtttctttccaagttaaagagttcccaggcatcatcctcaatgatcttcctctatattcctgtacaatattgttgatagga

SEQ ID NO: 268 - DNA, 200 bp, Amaranthus palmeri
tcctatcaacaatattgtacaggaatatagaggaagatcattgaggatgatgcctgggaactctttaacttggaaagaaacatggcatataccaaagttttccaatcagttgcttcactaaagagaaatatgatcgtaatttttacaaatgaaacaaaacgctgaatattggaccaggggaaaattctcatggtttgaac

SEQ ID NO: 269 - DNA, 200 bp, Amaranthus palmeri
ttcctgtacaatattgttgataggaagttcattcatgccaataacaatatgtctcttgcgaatttctagaagaccagaaatttgttgtgacctgtggagttcttccaaaagtatcctctgtgcgacgcatgaaaaaagcctttgggctagactactgagatgcagctgcctggtaattcatgcctctctcccaagagagt

SEQ ID NO: 270 - DNA, 200 bp, Amaranthus palmeri
actctcttgggagagaggcatgaattaccaggcagctgcatctcagtagtctagcccaaaggcttttttcatgcgtcgcacagaggatacttttggaagaactccacaggtcacaacaaatttctggtcttctagaaattcgcaagagacatattgttattggcatgaatgaacttcctatcaacaatattgtacaggaa

SEQ ID NO: 271 - DNA, 200 bp, Amaranthus palmeri
attcatgcctctctcccaagagagtacgagaagtcatttatagccgcttaagagagccaaggatcaatttaggcgtgttctatttccatatcttaatgtatcactgaagtttagcaagtaaacaaacatcacaatccctgatgcttgcatagtcatggcaaatgttatactctttgtttacatatgaaaaaccagatatt

SEQ ID NO: 272 - DNA, 200 bp, Amaranthus palmeri
aatatctggtttttcatatgtaaacaaagagtataacatttgccatgactatgcaagcatcagggattgtgatgtttgtttacttgctaaacttcagtgatacattaagatatggaaatagaacacgcctaaattgatccttggctctcttaagcggctataaatgacttctcgtactctcttgggagagaggcatgaat

SEQ ID NO: 273 - DNA, 200 bp, Amaranthus palmeri
gtttacatatgaaaaaccagatattactccatatttttagaaaccagcaaccaaaggagcttaaatggtccctgctcctaagtcatatctcttggcaatggggtgtttgtagatcttgagtgctgccagtccacttactgtaatgcaatacatcaatattgagctagtttctcatgggaaaaaaccatagaaatgggaca

SEQ ID NO: 274 - DNA, 200 bp, Amaranthus palmeri
tgtcccatttctatggttttttcccatgagaaactagctcaatattgatgtattgcattacagtaagtggactggcagcactcaagatctacaaacaccccattgccaagagatatgacttaggagcagggaccatttaagctcctttggttgctggtttctaaaaatatggagtaatatctggtttttcatatgtaaac

SEQ ID NO: 275 - DNA, 200 bp, Amaranthus palmeri
gggaaaaaaccatagaaatgggacaaatttgatgttaatgttctgtaatccaacttgaggattagttttatcacataaaagctacattgaaagttctattattattttgagtttgcatcttatgttgtttttcctttgtgattttatccattttcttaactagttattcgtttcctgaagtttttagtgtcataactcct

SEQ ID NO: 276 - DNA, 200 bp, Amaranthus palmeri
aggagttatgacactaaaaacttcaggaaacgaataactagttaagaaaatggataaaatcacaaaggaaaaacaacataagatgcaaactcaaaataataatagaactttcaatgtagcttttatgtgataaaactaatcctcaagttggattacagaacattaacatcaaatttgtcccatttctatggttttttccc

SEQ ID NO: 277 - DNA, 200 bp, Amaranthus palmeri
tgaagtttttagtgtcataactcctaatcacaatcatgctacagggcacaacagtggtcgacaacttgctgtatagtgatgatattctttatatgttggacgctctcagaactcttggtttaaaagtggaggatgatagtacagccaaaagggcagtcgtagagggttgtggtggtctgtttcctgttggtaaagatgga

SEQ ID NO: 278 - DNA, 200 bp, Amaranthus palmeri
tccatctttaccaacaggaaacagaccaccacaaccctctacgactgcccttttggctgtactatcatcctccacttttaaaccaagagttctgagagcgtccaacatataaagaatatcatcactatacagcaagttgtcgaccactgttgtgccctgtagcatgattgtgattaggagttatgacactaaaaacttca

SEQ ID NO: 279 - DNA, 200 bp, Amaranthus palmeri
tctgtttcctgttggtaaagatggaaaggaagagattcaacttttccttggtaatgcaggaacagcgatgcgcccattgacagctgcggttgccgttgctggaggaaattcaaggtttgtccaattatattctttatgtgagtgttgttttttgtgttagtttcaatcatgaaggtactaatgcagaagccgtacccctg

SEQ ID NO: 280 - DNA, 200 bp, Amaranthus palmeri
caggggtacggcttctgcattagtaccttcatgattgaaactaacacaaaaaacaacactcacataaagaatataattggacaaaccttgaatttcctccagcaacggcaaccgcagctgtcaatgggcgcatcgctgttcctgcattaccaaggaaaagttgaatctcttcctttccatctttaccaacaggaaacaga

SEQ ID NO: 281 - DNA, 200 bp, Amaranthus palmeri
tactaatgcagaagccgtacccctgaaattttcttattttgtatatatcaattggtaattgatgtaagatatttttccgagaggaataaaaaacagggggatagagaatattaaagtattgttctatcacattaactttttatcaaaggtgtacattgtgtttgtgaagtttatagagctaaagggatggaagggaaggg

SEQ ID NO: 282 - DNA, 200 bp, Amaranthus palmeri
cccttcccttccatccctttagctctataaacttcacaaacacaatgtacacctttgataaaaagttaatgtgatagaacaatactttaatattctctatccccctgttttttattcctctcggaaaaatatcttacatcaattaccaattgatatatacaaaataagaaaatttcaggggtacggcttctgcattagta

SEQ ID NO: 283 - DNA, 200 bp, Amaranthus palmeri
gagctaaagggatggaagggaaggggattgaagaagaggagaaaagaagaagatcctcctttgaataccaaggtttgaacggaagggagaaggaggaaactctaaacaatatggagatgaactgatgaagtttttggatcagaaccgcttgagaatcagagttaagccatgtgaaagtctatgagcatgacttcacctgg

SEQ ID NO: 284 - DNA, 200 bp, Amaranthus palmeri
ccaggtgaagtcatgctcatagactttcacatggcttaactctgattctcaagcggttctgatccaaaaacttcatcagttcatctccatattgtttagagtttcctccttctcccttccgttcaaaccttggtattcaaaggaggatcttcttcttttctcctcttcttcaatccccttcccttccatccctttagctc

SEQ ID NO: 285 - DNA, 200 bp, Amaranthus palmeri
agtctatgagcatgacttcacctggttaataattttaagctctcaacttctcatcctcttttctttgtcgaaaatgtcatgtcttcatgtgatacgtgcttacataatcgtttcttttgtaaagcgattgtctctccagatttctccccttacgaaaataatccttgaaggttgaagaaatcccttcatttccttttccc

SEQ ID NO: 286 - DNA, 200 bp, Amaranthus palmeri
gggaaaaggaaatgaagggatttcttcaaccttcaaggattattttcgtaaggggagaaatctggagagacaatcgctttacaaaagaaacgattatgtaagcacgtatcacatgaagacatgacattttcgacaaagaaaagaggatgagaagttgagagcttaaaattattaaccaggtgaagtcatgctcatagact

SEQ ID NO: 287 - DNA, 200 bp, Amaranthus palmeri
agaaatcccttcatttccttttcccctatttctctacccttcctactttggtgaaggattttgtatccctcccttttcatggtctatagtgttagatattcaaacttaagcttctcaagtttcatgtgggttctgattattattttatatatgcattaccaaggattcaaggtaatttgaaccaatcaagaccagaaccg

SEQ ID NO: 288 - DNA, 200 bp, Amaranthus palmeri
cggttctggtcttgattggttcaaattaccttgaatccttggtaatgcatatataaaataataatcagaacccacatgaaacttgagaagcttaagtttgaatatctaacactatagaccatgaaaagggagggatacaaaatccttcaccaaagtaggaagggtagagaaataggggaaaaggaaatgaagggatttct

SEQ ID NO: 289 - DNA, 200 bp, Amaranthus palmeri
tttgaaccaatcaagaccagaaccggatatgaattcttcaacctagtctgaacttgtacatctaaaacatgctagttacaactgaaatatgatcaacttctatagcctataagactctcaccttcatttgtaggttgccacatagcacgtattgtcgatccatccatcctcattatttgactcatcaaataaaggaacca

SEQ ID NO: 290 - DNA, 200 bp, Amaranthus palmeri
tggttcctttatttgatgagtcaaataatgaggatggatggatcgacaatacgtgctatgtggcaacctacaaatgaaggtgagagtcttataggctatagaagttgatcatatttcagttgtaactagcatgttttagatgtacaagttcagactaggttgaagaattcatatccggttctggtcttgattggttcaaa

SEQ ID NO: 291 - DNA, 200 bp, Amaranthus palmeri
tttgactcatcaaataaaggaaccactcatgtgaaattcctgtcctacaaaataatccatcttcctcatctcatttgtattcatgtagtttgcttcctcaatcctacaagtaaaaggacaactgcgattcaactcttggacctatttgacagtaaatccacgaatattaggacaatcacgttggtaatgaaccatcgctt

SEQ ID NO: 292 - DNA, 200 bp, Amaranthus palmeri
aagcgatggttcattaccaacgtgattgtcctaatattcgtggatttactgtcaaataggtccaagagttgaatcgcagttgtccttttacttgtaggattgaggaagcaaactacatgaatacaaatgagatgaggaagatggattattttgtaggacaggaatttcacatgagtggttcctttatttgatgagtcaaa

SEQ ID NO: 293 - DNA, 200 bp, Amaranthus palmeri
tcacgttggtaatgaaccatcgcttggcgcttgaaacatttgatttcctcaaaatcctttgcttcccccaacatttcatcctttgctttccacattaaagttggtgcccgaacctccatagccacaaacttggttgtagacaacacaccaacgtttctacctctaatagagataggatttgtataagccttactcttctt

SEQ ID NO: 294 - DNA, 200 bp, Amaranthus palmeri
aagaagagtaaggcttatacaaatcctatctctattagaggtagaaacgttggtgtgttgtctacaaccaagtttgtggctatggaggttcgggcaccaactttaatgtggaaagcaaaggatgaaatgttgggggaagcaaaggattttgaggaaatcaaatgtttcaagcgccaagcgatggttcattaccaacgtga

SEQ ID NO: 295 - DNA, 200 bp, Amaranthus palmeri
gatttgtataagccttactcttcttagatccttatgtttcatagacctttttcatcttgcacgtatcatcaaaagacaagttggtatgtatctcaggcttcacgcacaagtcaacatccttatcaccatacctcaatatgacaagccctacctctcaatcttctacaaagctatagatcttccatctcaatgcaaggaac

SEQ ID NO: 296 - DNA, 200 bp, Amaranthus palmeri
gttccttgcattgagatggaagatctatagctttgtagaagattgagaggtagggcttgtcatattgaggtatggtgataaggatgttgacttgtgcgtgaagcctgagatacataccaacttgtcttttgatgatacgtgcaagatgaaaaaggtctatgaaacataaggatctaagaagagtaaggcttatacaaatc

SEQ ID NO: 297 - DNA, 200 bp, Amaranthus palmeri
gatcttccatctcaatgcaaggaacttcaacacacgtataaactttttttgaatttaattgttcaaaggaaaaaacctttctttcatgtgcatttttatgtcaacatagctattaatcaacgtctttcctcttgtacgagctaattctcaatacctttaagcccacatgaagccttcttcttgagcttgaatttaaaaaa

SEQ ID NO: 298 - DNA, 200 bp, Amaranthus palmeri
ttttttaaattcaagctcaagaagaaggcttcatgtgggcttaaaggtattgagaattagctcgtacaagaggaaagacgttgattaatagctatgttgacataaaaatgcacatgaaagaaaggttttttcctttgaacaattaaattcaaaaaaagtttatacgtgtgttgaagttccttgcattgagatggaagatc

SEQ ID NO: 299 - DNA, 200 bp, Amaranthus palmeri
tcttcttgagcttgaatttaaaaaactggaaaatttgcttttcgtacggagttcttgttgttgtaaaaacactccgaacttctctcctattcacgatgatcttttgggtgtaaggacatactatcaaaattttctacgttatcctgaagccatgatcatccacctcgcaatatgctcaactttcagttcacgctgattca

SEQ ID NO: 300 - DNA, 200 bp, Amaranthus palmeri
tgaatcagcgtgaactgaaagttgagcatattgcgaggtggatgatcatggcttcaggataacgtagaaaattttgatagtatgtccttacacccaaaagatcatcgtgaataggagagaagttcggagtgtttttacaacaacaagaactccgtacgaaaagcaaattttccagttttttaaattcaagctcaagaaga

SEQ ID NO: 301 - DNA, 200 bp, Amaranthus palmeri
tcaactttcagttcacgctgattcaatatctgcgtgaatagattgatcaagcttgccatttgctcaagaatagttgagttttcctcttgtaatactcgattcctctcttctgtttttttagtcatcctactatttgctagcgacaatctcacaagaatataagaggggattctcatctattataacgcactactctgtac

SEQ ID NO: 302 - DNA, 200 bp, Amaranthus palmeri
gtacagagtagtgcgttataatagatgagaatcccctcttatattcttgtgagattgtcgctagcaaatagtaggatgactaaaaaaacagaagagaggaatcgagtattacaagaggaaaactcaactattcttgagcaaatggcaagcttgatcaatctattcacgcagatattgaatcagcgtgaactgaaagttga

SEQ ID NO: 303 - DNA, 200 bp, Amaranthus palmeri
tctattataacgcactactctgtacctaaggaactagtgtgggtgtcttatttttgtcctctcctcgtaggatataaaagagatgtgtatttgtgaatgattcaacataaaacaaaagtatgtaggctcttagattataccatctcattaacatatgatgaactcttacatatgctccttcacatatatttgtttttttg

SEQ ID NO: 304 - DNA, 200 bp, Amaranthus palmeri
caaaaaaacaaatatatgtgaaggagcatatgtaagagttcatcatatgttaatgagatggtataatctaagagcctacatacttttgttttatgttgaatcattcacaaatacacatctcttttatatcctacgaggagaggacaaaaataagacacccacactagttccttaggtacagagtagtgcgttataataga

SEQ ID NO: 305 - DNA, 200 bp, Amaranthus palmeri
tccttcacatatatttgtttttttggggtcatttattctagtagtccattgatattgaatcccttagttatggcattattgtccgtgcactgtctcaggagaatagatggattgttattgctttttctgtatctgatggtaatacaaagattgcaacatttgctagaccttgctgtttggatatagaaagaaaattattt

SEQ ID NO: 306 - DNA, 200 bp, Amaranthus palmeri
aaataattttctttctatatccaaacagcaaggtctagcaaatgttgcaatctttgtattaccatcagatacagaaaaagcaataacaatccatctattctcctgagacagtgcacggacaataatgccataactaagggattcaatatcaatggactactagaataaatgaccccaaaaaaacaaatatatgtgaagga

SEQ ID NO: 307 - DNA, 200 bp, Amaranthus palmeri
tttggatatagaaagaaaattatttgccattcatttccaaggggtcgaatgtagccttatccttattcgtgataacaaagagattgatttgtagtccttacatttgaaaatcctggacttcactgaatttatgtaactgttgcatgccatgaaatggaatactttattgattatgtgtttgggatatgtaagctgaagaa

SEQ ID NO: 308 - DNA, 200 bp, Amaranthus palmeri
ttcttcagcttacatatcccaaacacataatcaataaagtattccatttcatggcatgcaacagttacataaattcagtgaagtccaggattttcaaatgtaaggactacaaatcaatctctttgttatcacgaataaggataaggctacattcgaccccttggaaatgaatggcaaataattttctttctatatccaaa

SEQ ID NO: 309 - DNA, 200 bp, Amaranthus palmeri
tgtttgggatatgtaagctgaagaaggcaatttcccagctcctattaatgctatctacacttcatattatcctttctgatatagtttacttttctttgcatgtgtcgaattagttatgtgcttgatggagtaccaagaatgagggagcgccccattggggatctggtagcaggtctaaagcaacttggttcagatgtaga

SEQ ID NO: 310 - DNA, 200 bp, Amaranthus palmeri
tctacatctgaaccaagttgctttagacctgctaccagatccccaatggggcgctccctcattcttggtactccatcaagcacataactaattcgacacatgcaaagaaaagtaaactatatcagaaaggataatatgaagtgtagatagcattaataggagctgggaaattgccttcttcagcttacatatcccaaaca

SEQ ID NO: 311 - DNA, 200 bp, Amaranthus palmeri
taaagcaacttggttcagatgtagattgttttcttggcacaaattgccctcctgttcgggtcaatgctaaaggaggccttccagggggcaaggtaatgtgactaaacttctttatgttttgttagattttgggttttactccatctaattcaatgaatgatgattcatgcgtcaatttcttggtagcaattcctttccct

SEQ ID NO: 312 - DNA, 200 bp, Amaranthus palmeri
agggaaaggaattgctaccaagaaattgacgcatgaatcatcattcattgaattagatggagtaaaacccaaaatctaacaaaacataaagaagtttagtcacattaccttgccccctggaaggcctcctttagcattgacccgaacaggagggcaatttgtgccaagaaaacaatctacatctgaaccaagttgcttta

SEQ ID NO: 313 - DNA, 200 bp, Amaranthus palmeri
tttcttggtagcaattcctttccctacctaactatgacttctctgattgaccttttctatgaggtggggaatagtgtttttaatgtgaggaaaagagaaacccggggtatgagctttagcatgatagagtatgtatttgatactaaaactgcaaattaagttggaatcaagaataagaagacttatacagtataaatcaa

SEQ ID NO: 314 - DNA, 200 bp, Amaranthus palmeri
ttgatttatactgtataagtcttcttattcttgattccaacttaatttgcagttttagtatcaaatacatactctatcatgctaaagctcataccccgggtttctcttttcctcacattaaaaacactattccccacctcatagaaaaggtcaatcagagaagtcatagttaggtagggaaaggaattgctaccaagaaa

SEQ ID NO: 315 - DNA, 200 bp, Amaranthus palmeri
agaagacttatacagtataaatcaacagaggtgtctgctgtgtatatgtgtaatagacagttatagttagcaggaattcaggagataaaatgaagatggtgttgatgaaacttaacagacaattcagaaaacaaagtttgagtagtaagtagacttttgagaggctgcttctctctcaaatgagctataagttctaacaa

SEQ ID NO: 316 - DNA, 200 bp, Amaranthus palmeri
ttgttagaacttatagctcatttgagagagaagcagcctctcaaaagtctacttactactcaaactttgttttctgaattgtctgttaagtttcatcaacaccatcttcattttatctcctgaattcctgctaactataactgtctattacacatatacacagcagacacctctgttgatttatactgtataagtcttct

SEQ ID NO: 317 - DNA, 200 bp, Amaranthus palmeri
tcaaatgagctataagttctaacaaaagtctcaatacataatttagataataatcagatgcctctctcacgctccatccctttattatctagatttcttgattttttttcataacttatgcaacttatttcagcctcttccttcattccaccttctacttgaaataaaatgcaatctctaccttgtttctttatggtttg

SEQ ID NO: 318 - DNA, 200 bp, Amaranthus palmeri
caaaccataaagaaacaaggtagagattgcattttatttcaagtagaaggtggaatgaaggaagaggctgaaataagttgcataagttatgaaaaaaaatcaagaaatctagataataaagggatggagcgtgagagaggcatctgattattatctaaattatgtattgagacttttgttagaacttatagctcatttga

SEQ ID NO: 319 - DNA, 200 bp, Amaranthus palmeri
ctctaccttgtttctttatggtttgttcattttaataaagatttagtatgaaagtcaatattgcttttgcattgttgtttgtctaagatcctaatggcaagtccacataagatgtttgttggtatatgctaggttattaggatcgggattctacttaggatcgttgaggaggtaggattgaaataggtagaatcggttcg

SEQ ID NO: 320 - DNA, 200 bp, Amaranthus palmeri
cgaaccgattctacctatttcaatcctacctcctcaacgatcctaagtagaatcccgatcctaataacctagcatataccaacaaacatcttatgtggacttgccattaggatcttagacaaacaacaatgcaaaagcaatattgactttcatactaaatctttattaaaatgaacaaaccataaagaaacaaggtagag

SEQ ID NO: 321 - DNA, 200 bp, Amaranthus palmeri
gattgaaataggtagaatcggttcgtacttcgtaggattgtgccatgctacaaatatgcattgatgtgctttggattatttgttatcaattatatttgttcttctgttcagttttaaggtgtaagtaaaaacttattcgatttcatttattaagttttgaaaaaaatactttaataatcacttttaaactgcaaattgaa

SEQ ID NO: 322 - DNA, 200 bp, Amaranthus palmeri
ttcaatttgcagtttaaaagtgattattaaagtatttttttcaaaacttaataaatgaaatcgaataagtttttacttacaccttaaaactgaacagaagaacaaatataattgataacaaataatccaaagcacatcaatgcatatttgtagcatggcacaatcctacgaagtacgaaccgattctacctatttcaatc

SEQ ID NO: 323 - DNA, 200 bp, Amaranthus palmeri
aatcacttttaaactgcaaattgaaaaaaaattgcattttttagtgatgtttttttttttttgaatatcagtgatgttgatataattattttatagaatatttatacataattgaaatcttgattatatgaaaatattttacgattgaaactacttttataggatcggatcgtttgattgtaggatcttagaatcgtatt

SEQ ID NO: 324 - DNA, 200 bp, Amaranthus palmeri
aatacgattctaagatcctacaatcaaacgatccgatcctataaaagtagtttcaatcgtaaaatattttcatataatcaagatttcaattatgtataaatattctataaaataattatatcaacatcactgatattcaaaaaaaaaaaaacatcactaaaaaatgcaattttttttcaatttgcagtttaaaagtgatt

SEQ ID NO: 325 - DNA, 200 bp, Amaranthus palmeri
gattgtaggatcttagaatcgtattatgatcctaccacctaaatttttgagctagttctaccacattatgactctacctaagatccggatcgattgtttatttttagatcgtagaatcgtagatcaaaatcgagactctaatatctatgggtatatgtgttaaattattagtcagtagaacaattctctttttcttggta

SEQ ID NO: 326 - DNA, 200 bp, Amaranthus palmeri
taccaagaaaaagagaattgttctactgactaataatttaacacatatacccatagatattagagtctcgattttgatctacgattctacgatctaaaaataaacaatcgatccggatcttaggtagagtcataatgtggtagaactagctcaaaaatttaggtggtaggatcataatacgattctaagatcctacaatc

SEQ ID NO: 327 - DNA, 200 bp, Amaranthus palmeri
tagaacaattctctttttcttggtaaataaaatcgtacgatactttagtccggggggcgcgctttgtgtcctgtacggtaagtatcctgtgacaaaactgtacttcaggtgtcttcttcactcttgggaaagtgtaaatgtcttttgtcccgattaaggaagattttatgagaaattttcccacatgcttggcaccaatt

SEQ ID NO: 328 - DNA, 200 bp, Amaranthus palmeri
aattggtgccaagcatgtgggaaaatttctcataaaatcttccttaatcgggacaaaagacatttacactttcccaagagtgaagaagacacctgaagtacagttttgtcacaggatacttaccgtacaggacacaaagcgcgccccccggactaaagtatcgtacgattttatttaccaagaaaaagagaattgttcta

SEQ ID NO: 329 - DNA, 200 bp, Amaranthus palmeri
ttttcccacatgcttggcaccaatttgtttttatttagtagaagaagaaattatgtataacatgcatactcaggatggtagtgaatatgaaatgaagaaaggaggtaaagttgcatgctggaaacttataaagagatgattcattcaaaattttgatattcctaatagcatagttgtggttttcaatttcacagtcatga

SEQ ID NO: 330 - DNA, 200 bp, Amaranthus palmeri
tcatgactgtgaaattgaaaaccacaactatgctattaggaatatcaaaattttgaatgaatcatctctttataagtttccagcatgcaactttacctcctttcttcatttcatattcactaccatcctgagtatgcatgttatacataatttcttcttctactaaataaaaacaaattggtgccaagcatgtgggaaaa

SEQ ID NO: 331 - DNA, 200 bp, Amaranthus palmeri
gtggttttcaatttcacagtcatgaagtaagaacctctctaatattatccatttgttttgtgaattgatcaaattagaactacaatttcaatgtttgttgttaatgagaagttctagcatagttgtggttttcaatttcacagtcatgaagtaagaacctctctaatattatcgatttgttttgtaaactgtttgcaggt

SEQ ID NO: 332 - DNA, 200 bp, Amaranthus palmeri
acctgcaaacagtttacaaaacaaatcgataatattagagaggttcttacttcatgactgtgaaattgaaaaccacaactatgctagaacttctcattaacaacaaacattgaaattgtagttctaatttgatcaattcacaaaacaaatggataatattagagaggttcttacttcatgactgtgaaattgaaaaccac

SEQ ID NO: 333 - DNA, 200 bp, Amaranthus palmeri
tttgttttgtaaactgtttgcaggtcaagctctctggatcggttagtagccaatatttaactgcacttctcatggctactcctttgggtcttggagacgtggagattgagatagttgataaattgatttctgtaccgtatgttgaaatgacaataaagttgatggaacgctttggagtatccgtagaacatagtgatagt

SEQ ID NO: 334 - DNA, 200 bp, Amaranthus palmeri
actatcactatgttctacggatactccaaagcgttccatcaactttattgtcatttcaacatacggtacagaaatcaatttatcaactatctcaatctccacgtctccaagacccaaaggagtagccatgagaagtgcagttaaatattggctactaaccgatccagagagcttgacctgcaaacagtttacaaaacaaa

SEQ ID NO: 335 - DNA, 200 bp, Amaranthus palmeri
agtatccgtagaacatagtgatagttgggacaggttctacattcgaggtggtcagaaatacaagtaagtctctcatcttatattacatgtccttttaacgtgtctccattagtagactgaaaacacatgtaaatacatcagatctcctggaaaggcatatgttgagggtgatgcttcaagtgctagctacttcctagccg

SEQ ID NO: 336 - DNA, 200 bp, Amaranthus palmeri
cggctaggaagtagctagcacttgaagcatcaccctcaacatatgcctttccaggagatctgatgtatttacatgtgttttcagtctactaatggagacacgttaaaaggacatgtaatataagatgagagacttacttgtatttctgaccacctcgaatgtagaacctgtcccaactatcactatgttctacggatact

SEQ ID NO: 337 - DNA, 200 bp, Amaranthus palmeri
tcaagtgctagctacttcctagccggagccgccgtcactggtgggactgtcactgtcaagggttgtggaacaagcagtttacaggtataatgttaacccttacccttcacattgttctgctaaattctagaggaccctttcaattctgggtgggataagcacggcaatttgaccgcaaaaaaattgcaaaattattctgc

SEQ ID NO: 338 - DNA, 200 bp, Amaranthus palmeri
gcagaataattttgcaatttttttgcggtcaaattgccgtgcttatcccacccagaattgaaagggtcctctagaatttagcagaacaatgtgaagggtaagggttaacattatacctgtaaactgcttgttccacaacccttgacagtgacagtcccaccagtgacggcggctccggctaggaagtagctagcacttga

SEQ ID NO: 339 - DNA, 200 bp, Amaranthus palmeri
caaaaaaattgcaaaattattctgctgatagaacatctcgagatgagatcatattgagttttggcgtcaacataaacctaatcaaataatgaaaaatacaaacatcatatggtttcttttgtctttatgactagacactctctattattccttgattgggatcttatttgaaattgctgtgtagcctacacctcatgttc

SEQ ID NO: 340 - DNA, 200 bp, Amaranthus palmeri
gaacatgaggtgtaggctacacagcaatttcaaataagatcccaatcaaggaataatagagagtgtctagtcataaagacaaaagaaaccatatgatgtttgtatttttcattatttgattaggtttatgttgacgccaaaactcaatatgatctcatctcgagatgttctatcagcagaataattttgcaatttttttg

SEQ ID NO: 341 - DNA, 200 bp, Amaranthus palmeri
gctgtgtagcctacacctcatgttcagattttgttcgtataccagacttttcttgattgggatcttatttgtcccctggattttgcatagggtgatgtaaaatttgccgaagttcttgagaagatgggttgcaaggtcacctggacagagaatagtgtaactgttactggaccacccagggattcatctggaaagaaaca

SEQ ID NO: 342 - DNA, 200 bp, Amaranthus palmeri
tgtttctttccagatgaatccctgggtggtccagtaacagttacactattctctgtccaggtgaccttgcaacccatcttctcaagaacttcggcaaattttacatcaccctatgcaaaatccaggggacaaataagatcccaatcaagaaaagtctggtatacgaacaaaatctgaacatgaggtgtaggctacacagc

SEQ ID NO: 343 - DNA, 200 bp, Amaranthus palmeri
ccagggattcatctggaaagaaacatctgcgtgctatcgacgtcaacatgaacaaaatgccagatgttgctatgactcttgcagttgttgccttgtatgcagatgggcccaccgccatcagagatggtatgcttaactcttttcattgaactgtggcttatgtagactctttcaaatattgataatgaaatttagtgtgt

SEQ ID NO: 344 - DNA, 200 bp, Amaranthus palmeri
acacactaaatttcattatcaatatttgaaagagtctacataagccacagttcaatgaaaagagttaagcataccatctctgatggcggtgggcccatctgcatacaaggcaacaactgcaagagtcatagcaacatctggcattttgttcatgttgacgtcgatagcacgcagatgtttctttccagatgaatccctgg

SEQ ID NO: 345 - DNA, 200 bp, Amaranthus palmeri
atattgataatgaaatttagtgtgtcataagaaaatcggaatttggacttgtttttgttttggaatattcaaacagctagaaagatgttttttttgctctaatggtggttaaactatcactgtccttgatgggaaattatgatttttgctgtccccaatgtgtttattggcatatcttgatacaattaagtgagggacca

SEQ ID NO: 346 - DNA, 200 bp, Amaranthus palmeri
tggtccctcacttaattgtatcaagatatgccaataaacacattggggacagcaaaaatcataatttcccatcaaggacagtgatagtttaaccaccattagagcaaaaaaaacatctttctagctgtttgaatattccaaaacaaaaacaagtccaaattccgattttcttatgacacactaaatttcattatcaatat

SEQ ID NO: 347 - DNA, 200 bp, Amaranthus palmeri
cttgatacaattaagtgagggaccactttgcaccattaagtttctcatagtcatcaccatttctaaataattaaaatttagtattttgtagacttgttatgaaatgacgttaatttttaacaatacttaatggtcttaaaggggtgtttgggaaatgactgctgattaaaattgttttgactagatgatttttatcaact

SEQ ID NO: 348 - DNA, 200 bp, Amaranthus palmeri
agttgataaaaatcatctagtcaaaacaattttaatcagcagtcatttcccaaacacccctttaagaccattaagtattgttaaaaattaacgtcatttcataacaagtctacaaaatactaaattttaattatttagaaatggtgatgactatgagaaacttaatggtgcaaagtggtccctcacttaattgtatcaag

SEQ ID NO: 349 - DNA, 200 bp, Amaranthus palmeri
tttgactagatgatttttatcaactgatttgacctattgaatttgaacatgcttttaggaatagcttgttcaaaaatagcttcttcagaacaataagttgtttcaatcaactaatataccaaacactaaccaattatttacaattgtgccaaaataagctaaaattgtcaaatcaactattatgcaacctcaggatgtgt

SEQ ID NO: 350 - DNA, 200 bp, Amaranthus palmeri
acacatcctgaggttgcataatagttgatttgacaattttagcttattttggcacaattgtaaataattggttagtgtttggtatattagttgattgaaacaacttattgttctgaagaagctatttttgaacaagctattcctaaaagcatgttcaaattcaataggtcaaatcagttgataaaaatcatctagtcaaa

SEQ ID NO: 351 - DNA, 200 bp, Amaranthus palmeri
actattatgcaacctcaggatgtgttccggggatatgaattgaaacccatctttggcagagtagagataagacgaaaattgatccaatcttagggatgaatgttgagatattatttccataaatatactgtggtggcatttagggttttttatttaacaaggggtgtttagtttggagaactttttattgaaaacctgtt

SEQ ID NO: 352 - DNA, 200 bp, Amaranthus palmeri
aacaggttttcaataaaaagttctccaaactaaacaccccttgttaaataaaaaaccctaaatgccaccacagtatatttatggaaataatatctcaacattcatccctaagattggatcaattttcgtcttatctctactctgccaaagatgggtttcaattcatatccccggaacacatcctgaggttgcataatagt

SEQ ID NO: 353 - DNA, 200 bp, Amaranthus palmeri
gagaactttttattgaaaacctgttttctccatattcccatactgggttgacaatgaaaatttgaaaattagggttgaaaagaattattccttccattattagcttacaaacttatatagttggatgaaaattaaatttcattcactttcactccatctcccttggtagcattatcgtattccatcaaacaaaacaaaag

SEQ ID NO: 354 - DNA, 200 bp, Amaranthus palmeri
cttttgttttgtttgatggaatacgataatgctaccaagggagatggagtgaaagtgaatgaaatttaattttcatccaactatataagtttgtaagctaataatggaaggaataattcttttcaaccctaattttcaaattttcattgtcaacccagtatgggaatatggagaaaacaggttttcaataaaaagttctc

SEQ ID NO: 355 - DNA, 200 bp, Amaranthus palmeri
cgtattccatcaaacaaaacaaaagaaaagtagtaataattaacgtttaattggaaaattgtttctcatggaaaatgttctccgccagaccaaatactttcggaacgaggaagcattttggaataaagaaccttgtgcttggattaatatatttgtctatgagatagttttctctagagtttacttgtatgtttattaac

SEQ ID NO: 356 - DNA, 200 bp, Amaranthus palmeri
gttaataaacatacaagtaaactctagagaaaactatctcatagacaaatatattaatccaagcacaaggttctttattccaaaatgcttcctcgttccgaaagtatttggtctggcggagaacattttccatgagaaacaattttccaattaaacgttaattattactacttttcttttgttttgtttgatggaatacg

SEQ ID NO: 357 - DNA, 200 bp, Amaranthus palmeri
agagtttacttgtatgtttattaactgaacacgcctcctttgcaatcaaagaaaaaggaattatttcacctctaagcataccgaaaacatcgacgcaaaatacatgtcaagatgtgtaatgattttgttatgtgaattaacagtggctagctggagagtgaaggaaaccgaacggatgattgccatttgcacagaactga

SEQ ID NO: 358 - DNA, 200 bp, Amaranthus palmeri
tcagttctgtgcaaatggcaatcatccgttcggtttccttcactctccagctagccactgttaattcacataacaaaatcattacacatcttgacatgtattttgcgtcgatgttttcggtatgcttagaggtgaaataattcctttttctttgattgcaaaggaggcgtgttcagttaataaacatacaagtaaactct

SEQ ID NO: 359 - DNA, 200 bp, Amaranthus palmeri
atgattgccatttgcacagaactgagaaaggttagcagccttttacattctcgaaagctgtaattgttcttgagtaatatatattcaaactataactgatgttattttgcattcctatcaatacattcagcttggggcaacagttgaggaaggatctgattactgtgtgatcactccgcctgaaaagctaaaccccaccg

SEQ ID NO: 360 - DNA, 200 bp, Amaranthus palmeri
cggtggggtttagcttttcaggcggagtgatcacacagtaatcagatccttcctcaactgttgccccaagctgaatgtattgataggaatgcaaaataacatcagttatagtttgaatatatattactcaagaacaattacagctttcgagaatgtaaaaggctgctaacctttctcagttctgtgcaaatggcaatcat

SEQ ID NO: 361 - DNA, 200 bp, Amaranthus palmeri
ccgcctgaaaagctaaaccccaccgccattgaaacttatgacgatcaccgaatggccatggcattctctcttgctgcctgtgcagatgttcccgtcactatccttgatccgggatgcacccgtaaaaccttcccggactactttgatgttttagaaaagttcgccaagcattgagtagctatatacgagatccttaaatt

SEQ ID NO: 362 - DNA, 200 bp, Amaranthus palmeri
aatttaaggatctcgtatatagctactcaatgcttggcgaacttttctaaaacatcaaagtagtccgggaaggttttacgggtgcatcccggatcaaggatagtgacgggaacatctgcacaggcagcaagagagaatgccatggccattcggtgatcgtcataagtttcaatggcggtggggtttagcttttcaggcgg

SEQ ID NO: 363 - DNA, 200 bp, Amaranthus palmeri
tagctatatacgagatccttaaattgtacgccgaaggttttgatttgagtctaatagtagataaaaggctataaataaactggctttctgcttgagtaattatgaaattctttgtattatgtttgtgagattttaagtagcttataaattacaatgtactaaagtctagaaataagttatgtatcttttaaatcaatgag

SEQ ID NO: 364 - DNA, 200 bp, Amaranthus palmeri
ctcattgatttaaaagatacataacttatttctagactttagtacattgtaatttataagctacttaaaatctcacaaacataatacaaagaatttcataattactcaagcagaaagccagtttatttatagccttttatctactattagactcaaatcaaaaccttcggcgtacaatttaaggatctcgtatatagcta

SEQ ID NO: 365 - DNA, 200 bp, Amaranthus palmeri
gttatgtatcttttaaatcaatgagaaatgcatacttgaaaggcttgaccttgtattcgtgacctaaagagtactaactttggagtttccaagtcatttgtttatctcatttttttttaatttttgatttaaattgtttattttcatgagtaatcatgtactccctccgttcctttttgtttttccaccttactaataca

SEQ ID NO: 366 - DNA, 200 bp, Amaranthus palmeri
tgtattagtaaggtggaaaaacaaaaaggaacggagggagtacatgattactcatgaaaataaacaatttaaatcaaaaattaaaaaaaaatgagataaacaaatgacttggaaactccaaagttagtactctttaggtcacgaatacaaggtcaagcctttcaagtatgcatttctcattgatttaaaagatacataac

SEQ ID NO: 367 - DNA, 200 bp, Amaranthus palmeri
tttgtttttccaccttactaatacaggtagttccataagtttttccactttagaatactttccatttttggaaagttttcatcccagttcccacatttactccttaaaaccccactttccttactttacactactatttaattattttctctcttatacttccaatacaagtattacattatactattatttaattattt

SEQ ID NO: 368 - DNA, 200 bp, Amaranthus palmeri
aaataattaaataatagtataatgtaatacttgtattggaagtataagagagaaaataattaaatagtagtgtaaagtaaggaaagtggggttttaaggagtaaatgtgggaactgggatgaaaactttccaaaaatggaaagtattctaaagtggaaaaacttatggaactacctgtattagtaaggtggaaaaacaaa

SEQ ID NO: 369 - DNA, 200 bp, Amaranthus palmeri
acattatactattatttaattattttttctctcatactttcaatacaatcattacttttcactactatgaagtaattaaaataatacccattaccaccaaagattccatttttcttaatcttggtgaaaaacccaaataggaacatcaaaaaggaacggagggagtatccaaaataagggaactaattgttatttttact

SEQ ID NO: 370 - DNA, 200 bp, Amaranthus palmeri
agtaaaaataacaattagttcccttattttggatactccctccgttcctttttgatgttcctatttgggtttttcaccaagattaagaaaaatggaatctttggtggtaatgggtattattttaattacttcatagtagtgaaaagtaatgattgtattgaaagtatgagagaaaaaataattaaataatagtataatgt

SEQ ID NO: 371 - DNA, 200 bp, Amaranthus palmeri
aagggaactaattgttatttttactatttttcattactttctaattgattctcccacctctttaacaataaaattcctttagttagcaaattcaaaaaaaaaaaattcctttagttagctatttaattaattttgttttcctaatttgactaatacttcttgaaaatttacctacaatccaagcgatctctttgaaatta

SEQ ID NO: 372 - DNA, 200 bp, Amaranthus palmeri
taatttcaaagagatcgcttggattgtaggtaaattttcaagaagtattagtcaaattaggaaaacaaaattaattaaatagctaactaaaggaattttttttttttgaatttgctaactaaaggaattttattgttaaagaggtgggagaatcaattagaaagtaatgaaaaatagtaaaaataacaattagttccctt

SEQ ID NO: 373 - DNA, 200 bp, Amaranthus palmeri
aatccaagcgatctctttgaaattaaataggaatagtgtgttggggagctggcagttatagaatacgggtgatcaaaacaaattacaagatcgattcacatatggattttcggataatgaaaatcgtaatccggattatatatcgaatatccggtttatttattcttaattattttttgctttttctaaaacaaaattgt

SEQ ID NO: 374 - DNA, 200 bp, Amaranthus palmeri
acaattttgttttagaaaaagcaaaaaataattaagaataaataaaccggatattcgatatataatccggattacgattttcattatccgaaaatccatatgtgaatcgatcttgtaatttgttttgatcacccgtattctataactgccagctccccaacacactattcctatttaatttcaaagagatcgcttggatt

SEQ ID NO: 375 - DNA, 200 bp, Amaranthus palmeri
tttgctttttctaaaacaaaattgtattttattacaccaagtagaagagtgaaacgttgaaactttgatgtgtttaaagaagagacacttgaaagatgacttgacttagagaagtgaaacataaaaaaatgaaatttgtaagagcatataacattagatacaaaagaatataaaaggagaatatatgtagatgataattg

SEQ ID NO: 376 - DNA, 200 bp, Amaranthus palmeri
caattatcatctacatatattctccttttatattcttttgtatctaatgttatatgctcttacaaatttcatttttttatgtttcacttctctaagtcaagtcatctttcaagtgtctcttctttaaacacatcaaagtttcaacgtttcactcttctacttggtgtaataaaatacaattttgttttagaaaaagcaaa

SEQ ID NO: 377 - DNA, 200 bp, Amaranthus palmeri
ggagaatatatgtagatgataattgtaactgaatttgcaagttgtataatcaggcgtccaacatgcgtatttggagtaaagagataagtccaagcaacatagttgtctatgaccattttacattatggtatgatgattcatgactactgagcttgtttgttgattagtcttgtgcacttctaatatacaatcttaaatag

SEQ ID NO: 378 - DNA, 200 bp, Amaranthus palmeri
ctatttaagattgtatattagaagtgcacaagactaatcaacaaacaagctcagtagtcatgaatcatcataccataatgtaaaatggtcatagacaactatgttgcttggacttatctctttactccaaatacgcatgttggacgcctgattatacaacttgcaaattcagttacaattatcatctacatatattctcc

SEQ ID NO: 379 - DNA, 200 bp, Amaranthus palmeri
acttctaatatacaatcttaaatagcctctttttatcttctttttgtgactggtatgtaacatggctacatatattctgtgagtaatcttttaatattctttctagtttcctttgttcttatcttgtgttactctagtcgtattactggacgaacttaacttcataactttcagttcaatgtgctgaacctttatgttct

SEQ ID NO: 380 - DNA, 200 bp, Amaranthus palmeri
agaacataaaggttcagcacattgaactgaaagttatgaagttaagttcgtccagtaatacgactagagtaacacaagataagaacaaaggaaactagaaagaatattaaaagattactcacagaatatatgtagccatgttacataccagtcacaaaaagaagataaaaagaggctatttaagattgtatattagaagt

SEQ ID NO: 381 - DNA, 200 bp, Amaranthus palmeri
tcaatgtgctgaacctttatgttcttttgaaattggggcgtggtgtacccaacgtgcagaatctatttgtgagctttggtataaatgagcgattacaatgaaaggagcactctatgatttttgctatgccaagcaagcctggtgattttagtcagtttttgattttcctaatgtccttccagcaccatttaacggttagt

SEQ ID NO: 382 - DNA, 200 bp, Amaranthus palmeri
actaaccgttaaatggtgctggaaggacattaggaaaatcaaaaactgactaaaatcaccaggcttgcttggcatagcaaaaatcatagagtgctcctttcattgtaatcgctcatttataccaaagctcacaaatagattctgcacgttgggtacaccacgccccaatttcaaaagaacataaaggttcagcacattga

SEQ ID NO: 383 - DNA, 200 bp, Amaranthus palmeri
cttccagcaccatttaacggttagtttggtaatgaaatttggaaaatgtctgtattagcaaaagtcaaactacttttaatgactttcacgagtctcttcatcaagatgtttgatgtgtgcatgtatgtgtgcgcggaaatagtatctactcctcttgatttactcagttctcgaacaaaatttgactgcaacagacaata

SEQ ID NO: 384 - DNA, 200 bp, Amaranthus palmeri
tattgtctgttgcagtcaaattttgttcgagaactgagtaaatcaagaggagtagatactatttccgcgcacacatacatgcacacatcaaacatcttgatgaagagactcgtgaaagtcattaaaagtagtttgacttttgctaatacagacattttccaaatttcattaccaaactaaccgttaaatggtgctggaag

SEQ ID NO: 385 - DNA, 200 bp, Amaranthus palmeri
caaaatttgactgcaacagacaatatgtaaccttaaaatgctttgacacgcgatcaattttcaatctagatttggatttatgatcaaagtaaagaaggtttgatgtaaaaagcctaataaaagaagatattgttctaatgatatcaattgaagtccaattctgccagatatatctatagcttaaaactagggcattatat

SEQ ID NO: 386 - DNA, 200 bp, Amaranthus palmeri
atataatgccctagttttaagctatagatatatctggcagaattggacttcaattgatatcattagaacaatatcttcttttattaggctttttacatcaaaccttctttactttgatcataaatccaaatctagattgaaaattgatcgcgtgtcaaagcattttaaggttacatattgtctgttgcagtcaaattttg

SEQ ID NO: 387 - DNA, 200 bp, Amaranthus palmeri
atagcttaaaactagggcattatatacatgcaccgaaatgtaagtagcaaatcaacaacgataaaattaagagcttaactagttgagcaagagctacccctcggaatcaatcagtctcagttttagcgactttttatccttgaatgtcattttgtaagttatctactttgaaatatcgagaattttttcatagttatata

SEQ ID NO: 388 - DNA, 200 bp, Amaranthus palmeri
tatataactatgaaaaaattctcgatatttcaaagtagataacttacaaaatgacattcaaggataaaaagtcgctaaaactgagactgattgattccgaggggtagctcttgctcaactagttaagctcttaattttatcgttgttgatttgctacttacatttcggtgcatgtatataatgccctagttttaagctat

SEQ ID NO: 389 - DNA, 200 bp, Amaranthus palmeri
tcgagaattttttcatagttatataggaaggtcattaatgaagaaattattttgaataagttagaacttcaaaataaacatttaactacaaatcattgacaaacctagtacattgcatagggatccattatcacaacttccaaagaagattgtaacttaaaccctaatttgtttccaagcttgcaatttcaacaaaatct

SEQ ID NO: 390 - DNA, 200 bp, Amaranthus palmeri
agattttgttgaaattgcaagcttggaaacaaattagggtttaagttacaatcttctttggaagttgtgataatggatccctatgcaatgtactaggtttgtcaatgatttgtagttaaatgtttattttgaagttctaacttattcaaaataatttcttcattaatgaccttcctatataactatgaaaaaattctcga

SEQ ID NO: 391 - DNA, 200 bp, Amaranthus palmeri
caagcttgcaatttcaacaaaatctaacaaattccaactttttaagctttaaaaccacgtacattggacatttaattatatcattcctcaggattctaacttatatataacattaattatattacctaatatactataaaatttagaatttaaaatctgaaatttatcaccaaattacgtgtcaaagtatattattttat

SEQ ID NO: 392 - DNA, 200 bp, Amaranthus palmeri
ataaaataatatactttgacacgtaatttggtgataaatttcagattttaaattctaaattttatagtatattaggtaatataattaatgttatatataagttagaatcctgaggaatgatataattaaatgtccaatgtacgtggttttaaagcttaaaaagttggaatttgttagattttgttgaaattgcaagcttg

SEQ ID NO: 393 - DNA, 200 bp, Amaranthus palmeri
tacgtgtcaaagtatattattttatatttatcttttcatcgtgtttcctgattaactctttcggatatattattactcttgttaacaataccctcaaatgttcatttgctttttcccttataaaaaatcggaaaactttacatagcatgaataaggtttgatgaaacaccattgtagcactttttttgtttttgtatgat

SEQ ID NO: 394 - DNA, 200 bp, Amaranthus palmeri
atcatacaaaaacaaaaaaagtgctacaatggtgtttcatcaaaccttattcatgctatgtaaagttttccgattttttataagggaaaaagcaaatgaacatttgagggtattgttaacaagagtaataatatatccgaaagagttaatcaggaaacacgatgaaaagataaatataaaataatatactttgacacgta

SEQ ID NO: 395 - DNA, 200 bp, Amaranthus palmeri
agcactttttttgtttttgtatgatagcaacaagattacaagtttataaaaacacttagcaaattatgttaaatacaagcctattatgttaattttggactttttttaaatgtttttttagatttatatttacgatatacttgtatataaataaaacaaaatttaaaaatcaaaattttcctcccaacttcctccctttc

SEQ ID NO: 396 - DNA, 200 bp, Amaranthus palmeri
gaaagggaggaagttgggaggaaaattttgatttttaaattttgttttatttatatacaagtatatcgtaaatataaatctaaaaaaacatttaaaaaaagtccaaaattaacataataggcttgtatttaacataatttgctaagtgtttttataaacttgtaatcttgttgctatcatacaaaaacaaaaaaagtgct

SEQ ID NO: 397 - DNA, 200 bp, Amaranthus palmeri
ttttcctcccaacttcctccctttccttgttagttgtcacaacccctaacccaaccatcctttcccttgtgtcaacaaagagtacttaaaattagatatcgtattattgtaaaattcaaattatcataagagcatgatgtacatgtaacaagaaggtcaaacaaaagggagttaaaatcaatttagctttttactaaatt

SEQ ID NO: 398 - DNA, 200 bp, Amaranthus palmeri
aatttagtaaaaagctaaattgattttaactcccttttgtttgaccttcttgttacatgtacatcatgctcttatgataatttgaattttacaataatacgatatctaattttaagtactctttgttgacacaagggaaaggatggttgggttaggggttgtgacaactaacaaggaaagggaggaagttgggaggaaaa

SEQ ID NO: 399 - DNA, 200 bp, Amaranthus palmeri
aatcaatttagctttttactaaattcttaaaatctcgcaacgagaaaattaaatataagttagatttttgcattatttactaaaagttataaatctataggatgagctatatgaattaaatgtttaggaaatttaaaattatacccagttctcatatgaacatcaaatattacacggtatctataaacaaaaaccgtaat

SEQ ID NO: 400 - DNA, 200 bp, Amaranthus palmeri
attacggtttttgtttatagataccgtgtaatatttgatgttcatatgagaactgggtataattttaaatttcctaaacatttaattcatatagctcatcctatagatttataacttttagtaaataatgcaaaaatctaacttatatttaattttctcgttgcgagattttaagaatttagtaaaaagctaaattgatt

SEQ ID NO: 401 - DNA, 200 bp, Amaranthus palmeri
ggtatctataaacaaaaaccgtaattaaaagcagtctacgttaatttgaaaatctccttatattaatcaaggaatcagattaaaactctattaggttgtgtcttaaactattttttattttacatttatacattaaaaaatttattcgagggtatattaaaaataaataatattcttcataatcttagctaatcctaatt

SEQ ID NO: 402 - DNA, 200 bp, Amaranthus palmeri
aattaggattagctaagattatgaagaatattatttatttttaatataccctcgaataaattttttaatgtataaatgtaaaataaaaaatagtttaagacacaacctaatagagttttaatctgattccttgattaatataaggagattttcaaattaacgtagactgcttttaattacggtttttgtttatagatacc

SEQ ID NO: 403 - DNA, 200 bp, Amaranthus palmeri
ttcataatcttagctaatcctaattcctaactatcaaatcaatggttaacacagtaaattaccctctaatcccccaacagcccattgtttgtttggaagtgtaagcataaaaaacctcaataatactaattagtgtgctgtaaccatggtgtctatgacgtgtgttgggagttgagagcaaatagaattctgtgccaatt

SEQ ID NO: 404 - DNA, 200 bp, Amaranthus palmeri
aattggcacagaattctatttgctctcaactcccaacacacgtcatagacaccatggttacagcacactaattagtattattgaggttttttatgcttacacttccaaacaaacaatgggctgttgggggattagagggtaatttactgtgttaaccattgatttgatagttaggaattaggattagctaagattatgaa

SEQ ID NO: 405 - DNA, 200 bp, Amaranthus palmeri
gagcaaatagaattctgtgccaattgaaggctaaaacttaaaaccaaccaaacactcttttagagacgtattttaagtccagcctatcaaagacaatacctacctactgtattcttaatgtcaacttacattatccttaatgcctactttcaatatgttaaatgtctacttacatcatttttaatgcatacttacagtat

SEQ ID NO: 406 - DNA, 200 bp, Amaranthus palmeri
atactgtaagtatgcattaaaaatgatgtaagtagacatttaacatattgaaagtaggcattaaggataatgtaagttgacattaagaatacagtaggtaggtattgtctttgataggctggacttaaaatacgtctctaaaagagtgtttggttggttttaagttttagccttcaattggcacagaattctatttgctc

SEQ ID NO: 407 - DNA, 200 bp, Amaranthus palmeri
catttttaatgcatacttacagtattttaaacaatttataacgggtcagcccaatcagagatggtctctcaaacagaccgtctaagaccgtctctcacaagaatttgtgcaagcccttaatcctctaaacaaagatctcattccctggtttttgttcccttacaactcaacctttgctttgttttgtataaacaaccttc

SEQ ID NO: 408 - DNA, 200 bp, Amaranthus palmeri
gaaggttgtttatacaaaacaaagcaaaggttgagttgtaagggaacaaaaaccagggaatgagatctttgtttagaggattaagggcttgcacaaattcttgtgagagacggtcttagacggtctgtttgagagaccatctctgattgggctgacccgttataaattgtttaaaatactgtaagtatgcattaaaaatg

SEQ ID NO: 409 - DNA, 200 bp, Amaranthus palmeri
gctttgttttgtataaacaaccttcccttttttatgctttcctttgccagatttctaatcttccatcccccaactagcctacattgtttcattgaataattctaattaacacttctcaatacttgtacttaccgaattcttagtcatttgtatttaaagattatgcccacgttcactccccctccttgataatcacgttt

SEQ ID NO: 410 - DNA, 200 bp, Amaranthus palmeri
aaacgtgattatcaaggagggggagtgaacgtgggcataatctttaaatacaaatgactaagaattcggtaagtacaagtattgagaagtgttaattagaattattcaatgaaacaatgtaggctagttgggggatggaagattagaaatctggcaaaggaaagcataaaaaagggaaggttgtttatacaaaacaaagc

SEQ ID NO: 411 - DNA, 200 bp, Amaranthus palmeri
ctccccctccttgataatcacgtttttgctaatcccaatcttcttgatattactcatcttcacctttatgaacttgtaagctttgtatatatacacccaccatatgtatatcctttcatattaagtacttcatcatatccttaatactactttcaaaaaaaggaaaaacacaataaaaaggttagttatggctcaaattc

SEQ ID NO: 412 - DNA, 200 bp, Amaranthus palmeri
gaatttgagccataactaacctttttattgtgtttttcctttttttgaaagtagtattaaggatatgatgaagtacttaatatgaaaggatatacatatggtgggtgtatatatacaaagcttacaagttcataaaggtgaagatgagtaatatcaagaagattgggattagcaaaaacgtgattatcaaggagggggag

SEQ ID NO: 413 - DNA, 200 bp, Amaranthus palmeri
aaaaggttagttatggctcaaattcaacaattcactagcatttcttatgctccttctaagagaaaggggaatgggttcactaggaagtgtgcctctttaattaaagagcaacacgctcgaatctatatccttagaagatgtgctacaatgcttctttgctcgtacattgaagccgatgatgactaaacatctcctttatc

SEQ ID NO: 414 - DNA, 200 bp, Amaranthus palmeri
gataaaggagatgtttagtcatcatcggcttcaatgtacgagcaaagaagcattgtagcacatcttctaaggatatagattcgagcgtgttgctctttaattaaagaggcacacttcctagtgaacccattcccctttctcttagaaggagcataagaaatgctagtgaattgttgaatttgagccataactaacctttt

SEQ ID NO: 415 - DNA, 200 bp, Amaranthus palmeri
atgatgactaaacatctcctttatcttagccttacgttctgatgtaatccggtgcatactagtactagctacagtatatacgtaagtcataactatgccttttcccactctccattgtataccaggctcgagcagtaatgcaccttcgtttaatcgcttaatcatccaaatttttgacccaaaaggcaataattcgattg

SEQ ID NO: 416 - DNA, 200 bp, Amaranthus palmeri
caatcgaattattgccttttgggtcaaaaatttggatgattaagcgattaaacgaaggtgcattactgctcgagcctggtatacaatggagagtgggaaaaggcatagttatgacttacgtatatactgtagctagtactagtatgcaccggattacatcagaacgtaaggctaagataaaggagatgtttagtcatcat

SEQ ID NO: 417 - DNA, 200 bp, Amaranthus palmeri
gacccaaaaggcaataattcgattgggttttttcactttttagtttggatggttgctggtttaagaattttatgggtgcattgctgcttttttgtaaaccagcagtagtgctgatgaggcttacaagcatcaattcaatgccgctcagagaactggacttgagatttagagatggctgaaaatggggttatatacttaaa

SEQ ID NO: 418 - DNA, 200 bp, Amaranthus palmeri
tttaagtatataaccccattttcagccatctctaaatctcaagtccagttctctgagcggcattgaattgatgcttgtaagcctcatcagcactactgctggtttacaaaaaagcagcaatgcacccataaaattcttaaaccagcaaccatccaaactaaaaagtgaaaaaacccaatcgaattattgccttttgggtc

SEQ ID NO: 419 - DNA, 200 bp, Amaranthus palmeri
ctgaaaatggggttatatacttaaacttatgttgaatgtaactctaagagttttatcctaaaagatatatatctgataatacgactttgagagagtattatcattgtgttgtgttactaatctttatgagaaaaatgaaatgaaattgagtggatatgtaatacttcaacattccaaagcatattcttttgttgatatga

SEQ ID NO: 420 - DNA, 200 bp, Amaranthus palmeri
tcatatcaacaaaagaatatgctttggaatgttgaagtattacatatccactcaatttcatttcatttttctcataaagattagtaacacaacacaatgataatactctctcaaagtcgtattatcagatatatatcttttaggataaaactcttagagttacattcaacataagtttaagtatataaccccattttcag

SEQ ID NO: 421 - DNA, 200 bp, Amaranthus palmeri
aaagcatattcttttgttgatatgaacaatcctttaagctttcaactaaatggaaacatatacatagatttgcatacaaaaatcagtatacatgatcaagaaacctttgagcaatttaaatgttgtcagcccagaattgagttctgaatacataaacgcagtctaaattcaactcaaatgcatttagaatctgaaaattt

SEQ ID NO: 422 - DNA, 200 bp, Amaranthus palmeri
aaattttcagattctaaatgcatttgagttgaatttagactgcgtttatgtattcagaactcaattctgggctgacaacatttaaattgctcaaaggtttcttgatcatgtatactgatttttgtatgcaaatctatgtatatgtttccatttagttgaaagcttaaaggattgttcatatcaacaaaagaatatgcttt

SEQ ID NO: 423 - DNA, 200 bp, Amaranthus palmeri
aaatgcatttagaatctgaaaattttttggttgcatcaaaatttatattaaaaaaatcacaattacaacactttggagctccaaaacctgatattacaccgattctaaatttgctcttcaaattaaaatccctagcaacattgactattaattactgatcaattaaaatccctaacaatttcatcatcaattcttagaaa

SEQ ID NO: 424 - DNA, 200 bp, Amaranthus palmeri
tttctaagaattgatgatgaaattgttagggattttaattgatcagtaattaatagtcaatgttgctagggattttaatttgaagagcaaatttagaatcggtgtaatatcaggttttggagctccaaagtgttgtaattgtgatttttttaatataaattttgatgcaaccaaaaaattttcagattctaaatgcattt

SEQ ID NO: 425 - DNA, 200 bp, Amaranthus palmeri
caatttcatcatcaattcttagaaaattaaaatccagcaacaatcacaaactaaatcaaattcaacgctaaaacacaaatcaaaactcattatacgcaccagcttcagcatcaagaagaccgccataaggatcttgatctccaaaactgggaaccctaagtacaccgtgtaatccaacaattacagcagaaatcacacag

SEQ ID NO: 426 - DNA, 200 bp, Amaranthus palmeri
ctgtgtgatttctgctgtaattgttggattacacggtgtacttagggttcccagttttggagatcaagatccttatggcggtcttcttgatgctgaagctggtgcgtataatgagttttgatttgtgttttagcgttgaatttgatttagtttgtgattgttgctggattttaattttctaagaattgatgatgaaattg

SEQ ID NO: 427 - DNA, 200 bp, Amaranthus palmeri
aacaattacagcagaaatcacacaggcaaccatcagattcatccaagaatgagcgataaacaaagcgataatcgtaattacagcaagaacgccaaaaacgatgcgatcgtcaacgatgaaccccgtaatttcaagaggaaaaatgcgaggattaaaataaagaaagtaccaagataatgacaccacaaacacgagaagga

SEQ ID NO: 428 - DNA, 200 bp, Amaranthus palmeri
tccttctcgtgtttgtggtgtcattatcttggtactttctttattttaatcctcgcatttttcctcttgaaattacggggttcatcgttgacgatcgcatcgtttttggcgttcttgctgtaattacgattatcgctttgtttatcgctcattcttggatgaatctgatggttgcctgtgtgatttctgctgtaattgtt

SEQ ID NO: 429 - DNA, 200 bp, Amaranthus palmeri
aatgacaccacaaacacgagaaggagtgagagaggacgtaaagcgagagtaaagaagaagatgatgagaaagacgttaatgtagttaactcggaagtgagttagatttgagttgaaccgagttgtggcgtcagaaagggatactgggaatgaaagggcggagatatcgaaaaattccgaccatggtctggttgttgttgc

SEQ ID NO: 430 - DNA, 200 bp, Amaranthus palmeri
gcaacaacaaccagaccatggtcggaatttttcgatatctccgccctttcattcccagtatccctttctgacgccacaactcggttcaactcaaatctaactcacttccgagttaactacattaacgtctttctcatcatcttcttctttactctcgctttacgtcctctctcactccttctcgtgtttgtggtgtcatt

SEQ ID NO: 431 - DNA, 200 bp, Amaranthus palmeri
ccgaccatggtctggttgttgttgcggcggggtagtcatcggaagatggttgtaaagacatgtttgatttgagattttgtttttctttgacgaagatttgggttgtcgtgtggtggatggcgaatttctaattactctccatatattgttcaattttcatatactttatcatttctttattcttactaattcactaactt

SEQ ID NO: 432 - DNA, 200 bp, Amaranthus palmeri
aagttagtgaattagtaagaataaagaaatgataaagtatatgaaaattgaacaatatatggagagtaattagaaattcgccatccaccacacgacaacccaaatcttcgtcaaagaaaaacaaaatctcaaatcaaacatgtctttacaaccatcttccgatgactaccccgccgcaacaacaaccagaccatggtcgg

SEQ ID NO: 433 - DNA, 200 bp, Amaranthus palmeri
tttattcttactaattcactaactttatacctcaaaaaaaataaattaatttactaactttatcgacatcgtcttatcgggagactacttcaattagattatctcatttccctattattttaaaaaattatattatatacgagtatgtccaattttcgttgtgttttttaaattttctttcattaaagggctgcttgtat

SEQ ID NO: 434 - DNA, 200 bp, Amaranthus palmeri
atacaagcagccctttaatgaaagaaaatttaaaaaacacaacgaaaattggacatactcgtatataatataattttttaaaataatagggaaatgagataatctaattgaagtagtctcccgataagacgatgtcgataaagttagtaaattaatttattttttttgaggtataaagttagtgaattagtaagaataaa

SEQ ID NO: 435 - DNA, 200 bp, Amaranthus palmeri
tctttcattaaagggctgcttgtatgggtccgtctcacaatgagaggtcttatacaagacttgttgttcttaattatatagagtcagaggccggaggaaagagggtagcgacaaattataatcgtacgacgtacctatccaaaaagaggacaaggagaaatgtgtgtactcaatttatcacataaaaaatagatttatac

SEQ ID NO: 436 - DNA, 200 bp, Amaranthus palmeri
gtataaatctattttttatgtgataaattgagtacacacatttctccttgtcctctttttggataggtacgtcgtacgattataatttgtcgctaccctctttcctccggcctctgactctatataattaagaacaacaagtcttgtataagacctctcattgtgagacggacccatacaagcagccctttaatgaaaga

SEQ ID NO: 437 - DNA, 200 bp, Amaranthus palmeri
tatcacataaaaaatagatttatacataaagaaagtcagttcttatttatatgagtttgaaaaattatcaatttgtaatataaacatgttagatctgttagcaatatatgagttttatttttttaatttttacaagtatttcgaaaataattataacgatcgtgttcaacccatgtaataaagatctagttgaataataa

SEQ ID NO: 438 - DNA, 200 bp, Amaranthus palmeri
ttattattcaactagatctttattacatgggttgaacacgatcgttataattattttcgaaatacttgtaaaaattaaaaaaataaaactcatatattgctaacagatctaacatgtttatattacaaattgataatttttcaaactcatataaataagaactgactttctttatgtataaatctattttttatgtgata

SEQ ID NO: 439 - DNA, 200 bp, Amaranthus palmeri
taataaagatctagttgaataataaatcatttttataaaagaaaatgttacttgctagatttgcaactaaatgaaaacaaaatgaatataaagtagtaatatgttataatacatttaaaattaaaataataactattttattatcatacattcacaagatgaaatatgcattacatcatgtacatatattatatacttat

SEQ ID NO: 440 - DNA, 200 bp, Amaranthus palmeri
ataagtatataatatatgtacatgatgtaatgcatatttcatcttgtgaatgtatgataataaaatagttattattttaattttaaatgtattataacatattactactttatattcattttgttttcatttagttgcaaatctagcaagtaacattttcttttataaaaatgatttattattcaactagatctttatta

SEQ ID NO: 441 - DNA, 200 bp, Amaranthus palmeri
tcatgtacatatattatatacttatatatacttatacccctacataattttctctactatttattattccttatacatactatataaccaaaaatatttatgctataattatcaaataaaagatgcatacatatacctaactatatatttcttcactaggaattcattacaaaaaaaaaaaaagaaaattgtcaaaaata

SEQ ID NO: 442 - DNA, 200 bp, Amaranthus palmeri
tatttttgacaattttctttttttttttttgtaatgaattcctagtgaagaaatatatagttaggtatatgtatgcatcttttatttgataattatagcataaatatttttggttatatagtatgtataaggaataataaatagtagagaaaattatgtaggggtataagtatatataagtatataatatatgtacatga

SEQ ID NO: 443 - DNA, 200 bp, Amaranthus palmeri
gaacatatgagtgatcaattgtggagttaaactgatcaatatctatctaagtatttgatgttttatgatctaactcaattttgaacgtataagcttcaattatcgttttcaaaataagtatttcaaagtctataaagatattgtataagttttagttcattttgaataagttaatagttaaattatgacatataatttga

SEQ ID NO: 444 - DNA, 200 bp, Amaranthus palmeri
tcaaattatatgtcataatttaactattaacttattcaaaatgaactaaaacttatacaatatctttatagactttgaaatacttattttgaaaacgataattgaagcttatacgttcaaaattgagttagatcataaaacatcaaatacttagatagatattgatcagtttaactccacaattgatcactcatatgttc

SEQ ID NO: 445 - DNA, 200 bp, Amaranthus palmeri
agttaaattatgacatataatttgaccatgatattttataatctaacttaattttgaacttttaatattcaattatcgttttaaaaataagtattcaaattgtatagatatattgtataacattttgttcaaatttaattattgatagttttatttattgaccattcattttgaaattcatccatagaatgatagaataa

SEQ ID NO: 446 - DNA, 200 bp, Amaranthus palmeri
ttattctatcattctatggatgaatttcaaaatgaatggtcaataaataaaactatcaataattaaatttgaacaaaatgttatacaatatatctatacaatttgaatacttatttttaaaacgataattgaatattaaaagttcaaaattaagttagattataaaatatcatggtcaaattatatgtcataatttaact

SEQ ID NO: 447 - DNA, 200 bp, Amaranthus palmeri
attcatccatagaatgatagaataacactattttttatataacttcgttctaaaattttaaagcataaccagaagtattaggtagcaatttatcactttaacatcaaaattgatcacttataggttcaaattgaaacttttactttaattgatatgcttaagtactactttaaattgaaaattaatatctttaaggttaa

SEQ ID NO: 448 - DNA, 200 bp, Amaranthus palmeri
ttaaccttaaagatattaattttcaatttaaagtagtacttaagcatatcaattaaagtaaaagtttcaatttgaacctataagtgatcaattttgatgttaaagtgataaattgctacctaatacttctggttatgctttaaaattttagaacgaagttatataaaaaatagtgttattctatcattctatggatgaat

SEQ ID NO: 449 - DNA, 200 bp, Amaranthus palmeri
tatctttaaggttaaaattgatacctttaagattaggaaaaattgtcgggaataatccgaactatttgcaaactgctgtgaataatcccacgtattgattatttatgaataatcccacctttcaagtgtatttgctcgtggcacccccaaatgaaatttgacctattttagtaggttatcttcttcaatgtcttcttcaa

SEQ ID NO: 450 - DNA, 200 bp, Amaranthus palmeri
ttgaagaagacattgaagaagataacctactaaaataggtcaaatttcatttgggggtgccacgagcaaatacacttgaaaggtgggattattcataaataatcaatacgtgggattattcacagcagtttgcaaatagttcggattattcccgacaatttttcctaatcttaaaggtatcaattttaaccttaaagata

SEQ ID NO: 451 - DNA, 200 bp, Amaranthus palmeri
ttatcttcttcaatgtcttcttcaatgcctctttataaacccagctactgatttgtatcccacaagccattgttcttcttcaatttattccactttgttcttcaatcttcacctttcttcttccattgtgttcttccttcttcactattaaccctacgcaagccctcttcaaatgtattacaattttgaatcaaataata

SEQ ID NO: 452 - DNA, 200 bp, Amaranthus palmeri
tattatttgattcaaaattgtaatacatttgaagagggcttgcgtagggttaatagtgaagaaggaagaacacaatggaagaagaaaggtgaagattgaagaacaaagtggaataaattgaagaagaacaatggcttgtgggatacaaatcagtagctgggtttataaagaggcattgaagaagacattgaagaagataa

SEQ ID NO: 453 - DNA, 200 bp, Amaranthus palmeri
tattacaattttgaatcaaataatacaattgatgctcataattaacaccaagactagtgaccaccaaatcattaagatcaaaccatgaaatgcaatcaggatcaagtgaaaggcttctatattccccacccacataattcaaccctaccccagtccttttgaatttacccccataccaaaacatcacttgaaatttttca

SEQ ID NO: 454 - DNA, 200 bp, Amaranthus palmeri
tgaaaaatttcaagtgatgttttggtatgggggtaaattcaaaaggactggggtagggttgaattatgtgggtggggaatatagaagcctttcacttgatcctgattgcatttcatggtttgatcttaatgatttggtggtcactagtcttggtgttaattatgagcatcaattgtattatttgattcaaaattgtaata

SEQ ID NO: 455 - DNA, 200 bp, Amaranthus palmeri
ccaaaacatcacttgaaatttttcaaaattattaacctaaaaaaacaacacaattgaacataattaccaatgcatttctataacaacaaagaaaacattaaagaatcaaagattaaagtgaggaatggcaaagaaattaccatggtttgattgagaacaagaagacccaaaattcgtctgcacagccccaaaattttcgc

SEQ ID NO: 456 - DNA, 200 bp, Amaranthus palmeri
gcgaaaattttggggctgtgcagacgaattttgggtcttcttgttctcaatcaaaccatggtaatttctttgccattcctcactttaatctttgattctttaatgttttctttgttgttatagaaatgcattggtaattatgttcaattgtgttgtttttttaggttaataattttgaaaaatttcaagtgatgttttgg

SEQ ID NO: 457 - DNA, 200 bp, Amaranthus palmeri
gtctgcacagccccaaaattttcgcacagagcagcaataccacccccaaaattcgacactgttgataaaaaataaaccctaatttttttgggaaattacagttgatgaatgtgagtgttgattatggcgtgaagcttgatgattatgaatgacaattgtgcttcaagtttttgaaattttgaagttttgaaggaagatgg

SEQ ID NO: 458 - DNA, 200 bp, Amaranthus palmeri
ccatcttccttcaaaacttcaaaatttcaaaaacttgaagcacaattgtcattcataatcatcaagcttcacgccataatcaacactcacattcatcaactgtaatttcccaaaaaaattagggtttattttttatcaacagtgtcgaattttgggggtggtattgctgctctgtgcgaaaattttggggctgtgcagac

SEQ ID NO: 459 - DNA, 200 bp, Amaranthus palmeri
attttgaagttttgaaggaagatggtgtgaaggaatggtagaacaggaaatgaagttaagggtatgcctttttgggttgaatgtttattttatggaattaaagaatatgaaagatcatactctaacctgcaatattaggtcaaatttcatttgggggtgccacgagcaaatacacttgaaaggtgagattattcataaat

SEQ ID NO: 460 - DNA, 200 bp, Amaranthus palmeri
atttatgaataatctcacctttcaagtgtatttgctcgtggcacccccaaatgaaatttgacctaatattgcaggttagagtatgatctttcatattctttaattccataaaataaacattcaacccaaaaaggcatacccttaacttcatttcctgttctaccattccttcacaccatcttccttcaaaacttcaaaat

SEQ ID NO: 461 - DNA, 200 bp, Amaranthus palmeri
ttgaaaggtgagattattcataaataatcaatacttgggattattcacataggtttgcgaatagttcggattattcccaacaatttttccttaagattataattaaaaaatccccaaaagatgaaaaaaagagaaagcatgtaaaacacgcgaatcagaccggtccactcttgttttaatttgagacaattttgatgttg

SEQ ID NO: 462 - DNA, 200 bp, Amaranthus palmeri
caacatcaaaattgtctcaaattaaaacaagagtggaccggtctgattcgcgtgttttacatgctttctctttttttcatcttttggggattttttaattataatcttaaggaaaaattgttgggaataatccgaactattcgcaaacctatgtgaataatcccaagtattgattatttatgaataatctcacctttcaa

SEQ ID NO: 463 - DNA, 200 bp, Amaranthus palmeri
ttaatttgagacaattttgatgttgagtcatcccacaccaaccccaaaaaattcaacaacaaactcttataatgattccctctactctactagagtctacaccaacccactttctctttgcccaccaaaactttggtttggtaagaactaagccctcttctttcccttctctctcttaaaagcctaaaatccacctaact

SEQ ID NO: 464 - DNA, 200 bp, Amaranthus palmeri
agttaggtggattttaggcttttaagagagagaagggaaagaagagggcttagttcttaccaaaccaaagttttggtgggcaaagagaaagtgggttggtgtagactctagtagagtagagggaatcattataagagtttgttgttgaattttttggggttggtgtgggatgactcaacatcaaaattgtctcaaattaa

SEQ ID NO: 465 - DNA, 200 bp, Amaranthus palmeri
ttaaaagcctaaaatccacctaactttttcagccaacaaacaacgccaaattcagaggaagaataatggctcaagctactaccatcaacaatggtgtccatactggtcaattgcaccatactttacccaaaacccagttacccaaatcttcaaaaactcttaattttggatcaaacttgagaatttctccaaagttcatg

SEQ ID NO: 466 - DNA, 200 bp, Amaranthus palmeri
catgaactttggagaaattctcaagtttgatccaaaattaagagtttttgaagatttgggtaactgggttttgggtaaagtatggtgcaattgaccagtatggacaccattgttgatggtagtagcttgagccattattcttcctctgaatttggcgttgtttgttggctgaaaaagttaggtggattttaggcttttaa

SEQ ID NO: 467 - DNA, 200 bp, Amaranthus palmeri
cttgagaatttctccaaagttcatgtctttaaccaataaaagagttggtgggcaatcatcaattgttcccaagattcaagcttctgttgctgctgcagctgagaaaccttcatctgtcccagaaattgtgttacaacccatcaaagagatctctggtactgttcaattgcctgggtcaaagtctttatccaatcgaatcc

SEQ ID NO: 468 - DNA, 200 bp, Amaranthus palmeri
ggattcgattggataaagactttgacccaggcaattgaacagtaccagagatctctttgatgggttgtaacacaatttctgggacagatgaaggtttctcagctgcagcagcaacagaagcttgaatcttgggaacaattgatgattgcccaccaactcttttattggttaaagacatgaactttggagaaattctcaag

SEQ ID NO: 469 - DNA, 200 bp, Amaranthus palmeri
tcaaagtctttatccaatcgaatccttcttttagctgctttgtctgaggtatttatttctcaactgcgaaaacaatctctatttgatattggaatttatattacatactccatcttgttgtaattgcattagtacatacttatgttttgacctttgttcgtttgtttgttgaattggtagtgttgagaatttgaatctaa

SEQ ID NO: 470 - DNA, 200 bp, Amaranthus palmeri
ttagattcaaattctcaacactaccaattcaacaaacaaacgaacaaaggtcaaaacataagtatgtactaatgcaattacaacaagatggagtatgtaatataaattccaatatcaaatagagattgttttcgcagttgagaaataaatacctcagacaaagcagctaaaagaaggattcgattggataaagactttga

SEQ ID NO: 471 - DNA, 200 bp, Amaranthus palmeri
ggtagtgttgagaatttgaatctaattatttgtttttccatgtgaatttaatctgattaaatccacttcttatttatgttaagttgcaatgatgtttgccaaacggttatcattgaaggataagttcgcctacttttgaccctcccaacttcgcgttggtagagccattttatgttattgggggaaagtagaaagattta

SEQ ID NO: 472 - DNA, 200 bp, Amaranthus palmeri
taaatctttctactttcccccaataacataaaatggctctaccaacgcgaagttgggagggtcaaaagtaggcgaacttatccttcaatgataaccgtttggcaaacatcattgcaacttaacataaataagaagtggatttaatcagattaaattcacatggaaaaacaaataattagattcaaattctcaacactacc

SEQ ID NO: 473 - DNA, 200 bp, Amaranthus palmeri
tattgggggaaagtagaaagatttatttgttttgccattcgaaatagtagcgttcgtgattctgatttgggtgtctttatagatatgatatatgggttattcatgtaatgtgtaggtttatgcattatgttggatgcatgtctggtgttattgctgtaaatggatgaatgttgttatttggagacattttttcattcatt

SEQ ID NO: 474 - DNA, 200 bp, Amaranthus palmeri
aatgaatgaaaaaatgtctccaaataacaacattcatccatttacagcaataacaccagacatgcatccaacataatgcataaacctacacattacatgaataacccatatatcatatctataaagacacccaaatcagaatcacgaacgctactatttcgaatggcaaaacaaataaatctttctactttcccccaata

SEQ ID NO: 475 - DNA, 200 bp, Amaranthus palmeri
atttggagacattttttcattcattttttccctttttaattggaactggaagagggaaagttattgggagtaattaaaaggttgtgagttcgatacactgcatcaaagacgaagaacttgacatagatgttgaaggctaatccttatcactgcttgaattcaatatgtatctgaaaattttacccctctatatgcatctg

SEQ ID NO: 476 - DNA, 200 bp, Amaranthus palmeri
cagatgcatatagaggggtaaaattttcagatacatattgaattcaagcagtgataaggattagccttcaacatctatgtcaagttcttcgtctttgatgcagtgtatcgaactcacaaccttttaattactcccaataactttccctcttccagttccaattaaaaagggaaaaaatgaatgaaaaaatgtctccaaat

SEQ ID NO: 477 - DNA, 200 bp, Amaranthus palmeri
aattttacccctctatatgcatctgtttttgctaataaagtgtttttggactatcatgttttgtgatgcttaagagggtgatattactgagataaatggaaatatcaaaataacatctattgtgaagtagttttagaggcttttgattggtgcttcgactttggatttacttgcatcctagattgactcagtttgtgcaa

SEQ ID NO: 478 - DNA, 200 bp, Amaranthus palmeri
ttgcacaaactgagtcaatctaggatgcaagtaaatccaaagtcgaagcaccaatcaaaagcctctaaaactacttcacaatagatgttattttgatatttccatttatctcagtaatatcaccctcttaagcatcacaaaacatgatagtccaaaaacactttattagcaaaaacagatgcatatagaggggtaaaatt

SEQ ID NO: 479 - DNA, 200 bp, Amaranthus palmeri
tcctagattgactcagtttgtgcaatctgaaaatgatttcatcatggtatgaatatggttcaaaaacaaggctgcatctcatcgaacacgttgtaaagatttaaaattaatcaaattgatatttctagcattgtaaaggcttaaaaaactgtatctcaggctatattagggattctcatgctcttgaccgatatttaggt

SEQ ID NO: 480 - DNA, 200 bp, Amaranthus palmeri
acctaaatatcggtcaagagcatgagaatccctaatatagcctgagatacagttttttaagcctttacaatgctagaaatatcaatttgattaattttaaatctttacaacgtgttcgatgagatgcagccttgtttttgaaccatattcataccatgatgaaatcattttcagattgcacaaactgagtcaatctagga

SEQ ID NO: 481 - DNA, 200 bp, Amaranthus palmeri
tcatgctcttgaccgatatttaggtgttacgataaccacatcactcctacgatcgttaccacatgttaccacatgtttgcactttgttatgtgttacaagagataagtgttgcatgcagtggatcccttgtgattttgttctaggtagacagtgttgtttttgaatttcaaagcaggaattataacgagatttgatatta

SEQ ID NO: 482 - DNA, 200 bp, Amaranthus palmeri
taatatcaaatctcgttataattcctgctttgaaattcaaaaacaacactgtctacctagaacaaaatcacaagggatccactgcatgcaacacttatctcttgtaacacataacaaagtgcaaacatgtggtaacatgtggtaacgatcgtaggagtgatgtggttatcgtaacacctaaatatcggtcaagagcatga

SEQ ID NO: 483 - DNA, 200 bp, Amaranthus palmeri
ggaattataacgagatttgatattagggtttgaatttttttaaaagttttttgcattcctccgatttgcaacacggtttacctactgtttatttgaattttttgtgtgagaaaaggcttacaggcttgctcttgtatatgtgtatgtatttgctttgtggttaaatatgctgcatgttgtaatgaaaactctgcccgggg

SEQ ID NO: 484 - DNA, 200 bp, Amaranthus palmeri
ccccgggcagagttttcattacaacatgcagcatatttaaccacaaagcaaatacatacacatatacaagagcaagcctgtaagccttttctcacacaaaaaattcaaataaacagtaggtaaaccgtgttgcaaatcggaggaatgcaaaaaacttttaaaaaaattcaaaccctaatatcaaatctcgttataattcc

SEQ ID NO: 485 - DNA, 200 bp, Amaranthus palmeri
gttgtaatgaaaactctgcccggggatggtgggcttacacgccaaagaaaaagattgttttccacaactaaaaatatcccattggcaacagcgtgcaattatttagggaatggtgttagagcattaaaattggaaaataaatgagctctcattttgttcaaaccatgagaattttcccctggtccaatattcagcgtttt

SEQ ID NO: 486 - DNA, 200 bp, Amaranthus palmeri
aaaacgctgaatattggaccaggggaaaattctcatggtttgaacaaaatgagagctcatttattttccaattttaatgctctaacaccattccctaaataattgcacgctgttgccaatgggatatttttagttgtggaaaacaatctttttctttggcgtgtaagcccaccatccccgggcagagttttcattacaac

SEQ ID NO: 487 - DNA, 200 bp, Amaranthus palmeri
cccctggtccaatattcagcgttttgtttcatttgtaaaaattacgatcatatttctctttagtgaagcaactgattggaaaactttggtatatgccatgtttctttccaagttaaagagttcccaggcatcatcctcaatgatcttcctctatattcctgtacaatattgttgataggaagttcattcatgccaaggga

SEQ ID NO: 488 - DNA, 200 bp, Amaranthus palmeri
tcccttggcatgaatgaacttcctatcaacaatattgtacaggaatatagaggaagatcattgaggatgatgcctgggaactctttaacttggaaagaaacatggcatataccaaagttttccaatcagttgcttcactaaagagaaatatgatcgtaatttttacaaatgaaacaaaacgctgaatattggaccagggg

SEQ ID NO: 489 - DNA, 200 bp, Amaranthus palmeri
taggaagttcattcatgccaagggataacaatatgtctcttgcgaatttctagaagaccagaaatttgttgtgacctgtggagttcttccaaaagtatcctctgtgcgacgcatgaaaaaagcctttgggctagactactgagatgcagctgcctggtaattcatgcctctctcccaagagagtacgagaagtcatttat

SEQ ID NO: 490 - DNA, 200 bp, Amaranthus palmeri
ataaatgacttctcgtactctcttgggagagaggcatgaattaccaggcagctgcatctcagtagtctagcccaaaggcttttttcatgcgtcgcacagaggatacttttggaagaactccacaggtcacaacaaatttctggtcttctagaaattcgcaagagacatattgttatcccttggcatgaatgaacttccta

SEQ ID NO: 491 - DNA, 200 bp, Amaranthus palmeri
caagagagtacgagaagtcatttatagccgcttaagagagccaaggatcaatttaggcgtgttctatttccatatcttaatgtatcactgaagtttagcaagtaaacaaacatcacaatccctgatgcttgcatagtcatggcaaatgttatactctttgtttacatatgaaaaaccagatattactccatatttttaga

SEQ ID NO: 492 - DNA, 200 bp, Amaranthus palmeri
tctaaaaatatggagtaatatctggtttttcatatgtaaacaaagagtataacatttgccatgactatgcaagcatcagggattgtgatgtttgtttacttgctaaacttcagtgatacattaagatatggaaatagaacacgcctaaattgatccttggctctcttaagcggctataaatgacttctcgtactctcttg

SEQ ID NO: 493 - DNA, 200 bp, Amaranthus palmeri
ccagatattactccatatttttagaaaccagcaaccaaaggagcttaaatggtccctgctcctaagtcatatctcttggcaatggggtgtttgtagatcttgagtgctgccagtccacttactgtaatgcaatacatcaatattgagctagtttctcatgggaaaaaaccatagaaatgggacaaatttgatgttaatgt

SEQ ID NO: 494 - DNA, 200 bp, Amaranthus palmeri
acattaacatcaaatttgtcccatttctatggttttttcccatgagaaactagctcaatattgatgtattgcattacagtaagtggactggcagcactcaagatctacaaacaccccattgccaagagatatgacttaggagcagggaccatttaagctcctttggttgctggtttctaaaaatatggagtaatatctgg

SEQ ID NO: 495 - DNA, 200 bp, Amaranthus palmeri
aatgggacaaatttgatgttaatgttctgtaatccaacttgaggattagttttatcacataaaagctacattgaaagttctattattattttgagtttgcatcttatgttgtttttcctttgtgattttatccattttcttaactagttattcgtttcctgaagtttttagtgtcataactcctaatcacaatcatgcta

SEQ ID NO: 496 - DNA, 200 bp, Amaranthus palmeri
tagcatgattgtgattaggagttatgacactaaaaacttcaggaaacgaataactagttaagaaaatggataaaatcacaaaggaaaaacaacataagatgcaaactcaaaataataatagaactttcaatgtagcttttatgtgataaaactaatcctcaagttggattacagaacattaacatcaaatttgtcccatt

SEQ ID NO: 497 - DNA, 200 bp, Amaranthus palmeri
ataactcctaatcacaatcatgctacagggcacaacagtggtcgacaacttgctgtatagtgatgatattctttatatgttggacgctctcagaactcttggtttaaaagtggaggatgatagtacagccaaaagggcagtcgtagagggttgtggtggtctgtttcctgttggtaaagatggaaaggaagagattcaac

SEQ ID NO: 498 - DNA, 200 bp, Amaranthus palmeri
gttgaatctcttcctttccatctttaccaacaggaaacagaccaccacaaccctctacgactgcccttttggctgtactatcatcctccacttttaaaccaagagttctgagagcgtccaacatataaagaatatcatcactatacagcaagttgtcgaccactgttgtgccctgtagcatgattgtgattaggagttat

SEQ ID NO: 499 - DNA, 200 bp, Amaranthus palmeri
aaagatggaaaggaagagattcaacttttccttggtaatgcaggaacagcgatgcgcccattgacagctgcggttgccgttgctggaggaaattcaaggtttgtccaattatattctttatgtgagtgttgttttttgtgttagtttcaatcatgaaggtactaatgcagaagccgtacccctgaaattttcttattttg

SEQ ID NO: 500 - DNA, 200 bp, Amaranthus palmeri
caaaataagaaaatttcaggggtacggcttctgcattagtaccttcatgattgaaactaacacaaaaaacaacactcacataaagaatataattggacaaaccttgaatttcctccagcaacggcaaccgcagctgtcaatgggcgcatcgctgttcctgcattaccaaggaaaagttgaatctcttcctttccatcttt

SEQ ID NO: 501 - DNA, 200 bp, Amaranthus palmeri
gtacccctgaaattttcttattttgtatatatcaattggtaattgatgtaagatatttttccgagaggaataaaaaacagggggatagagaatattaaagtattgttctatcacattaactttttatcaaaggtgtacattgtgtttgtgaagtttatagagctaaagggatggaagggaaggggattgaagaagaggag

SEQ ID NO: 502 - DNA, 200 bp, Amaranthus palmeri
ctcctcttcttcaatccccttcccttccatccctttagctctataaacttcacaaacacaatgtacacctttgataaaaagttaatgtgatagaacaatactttaatattctctatccccctgttttttattcctctcggaaaaatatcttacatcaattaccaattgatatatacaaaataagaaaatttcaggggtac

SEQ ID NO: 503 - DNA, 200 bp, Amaranthus palmeri
agggaaggggattgaagaagaggagaaaagaagaagatcctcctttgaataccaaggtttgaacggaagggagaaggaggaaactctaaacaatatggagatgaactgatgaagtttttggatcagaaccgcttgagaatcagagttaagccatgtgaaagtctatgagcatgacttcacctggttaataattttaagct

SEQ ID NO: 504 - DNA, 200 bp, Amaranthus palmeri
agcttaaaattattaaccaggtgaagtcatgctcatagactttcacatggcttaactctgattctcaagcggttctgatccaaaaacttcatcagttcatctccatattgtttagagtttcctccttctcccttccgttcaaaccttggtattcaaaggaggatcttcttcttttctcctcttcttcaatccccttccct

SEQ ID NO: 505 - DNA, 200 bp, Amaranthus palmeri
ttcacctggttaataattttaagctctcaacttctcatcctcttttctttgtcgaaaatgtcatgtcttcatgtgatacgtgcttacataatcgtttcttttgtaaagcgattgtctctccagatttctccccttacgaaaataatccttgaaggttgaagaaatcccttcatttccttttcccctatttctctaccctt

SEQ ID NO: 506 - DNA, 200 bp, Amaranthus palmeri
aagggtagagaaataggggaaaaggaaatgaagggatttcttcaaccttcaaggattattttcgtaaggggagaaatctggagagacaatcgctttacaaaagaaacgattatgtaagcacgtatcacatgaagacatgacattttcgacaaagaaaagaggatgagaagttgagagcttaaaattattaaccaggtgaa

SEQ ID NO: 507 - DNA, 200 bp, Amaranthus palmeri
ccttttcccctatttctctacccttcctactttggtgaaggattttgtatccctcccttttcatggtctatagtgttagatattcaaacttaagcttctcaagtttcatgtgggttctgattattattttatatatgcattaccaaggattcaaggtaatttgaaccaatcaagaccagaaccggatatgaattcttcaa

SEQ ID NO: 508 - DNA, 200 bp, Amaranthus palmeri
ttgaagaattcatatccggttctggtcttgattggttcaaattaccttgaatccttggtaatgcatatataaaataataatcagaacccacatgaaacttgagaagcttaagtttgaatatctaacactatagaccatgaaaagggagggatacaaaatccttcaccaaagtaggaagggtagagaaataggggaaaagg

SEQ ID NO: 509 - DNA, 200 bp, Amaranthus palmeri
ccagaaccggatatgaattcttcaacctagtctgaacttgtacatctaaaacatgctagttacaactgaaatatgatcaacttctatagcctataagactctcaccttcatttgtaggttgccacatagcacgtattgtcgatccatccatcctcattatttgactcatcaaataaaggaaccactcatgtgaaattcct

SEQ ID NO: 510 - DNA, 200 bp, Amaranthus palmeri
aggaatttcacatgagtggttcctttatttgatgagtcaaataatgaggatggatggatcgacaatacgtgctatgtggcaacctacaaatgaaggtgagagtcttataggctatagaagttgatcatatttcagttgtaactagcatgttttagatgtacaagttcagactaggttgaagaattcatatccggttctgg

SEQ ID NO: 511 - DNA, 200 bp, Amaranthus palmeri
aaggaaccactcatgtgaaattcctgtcctacaaaataatccatcttcctcatctcatttgtattcatgtagtttgcttcctcaatcctacaagtaaaaggacaactgcgattcaactcttggacctatttgacagtaaatccacgaatattaggacaatcacgttggtaatgaaccatcgcttggcgcttgaaacattt

SEQ ID NO: 512 - DNA, 200 bp, Amaranthus palmeri
aaatgtttcaagcgccaagcgatggttcattaccaacgtgattgtcctaatattcgtggatttactgtcaaataggtccaagagttgaatcgcagttgtccttttacttgtaggattgaggaagcaaactacatgaatacaaatgagatgaggaagatggattattttgtaggacaggaatttcacatgagtggttcctt

SEQ ID NO: 513 - DNA, 200 bp, Amaranthus palmeri
ccatcgcttggcgcttgaaacatttgatttcctcaaaatcctttgcttcccccaacatttcatcctttgctttccacattaaagttggtgcccgaacctccatagccacaaacttggttgtagacaacacaccaacgtttctacctctaatagagataggatttgtataagccttactcttcttagatccttatgtttca

SEQ ID NO: 514 - DNA, 200 bp, Amaranthus palmeri
tgaaacataaggatctaagaagagtaaggcttatacaaatcctatctctattagaggtagaaacgttggtgtgttgtctacaaccaagtttgtggctatggaggttcgggcaccaactttaatgtggaaagcaaaggatgaaatgttgggggaagcaaaggattttgaggaaatcaaatgtttcaagcgccaagcgatgg

SEQ ID NO: 515 - DNA, 200 bp, Amaranthus palmeri
actcttcttagatccttatgtttcatagacctttttcatcttgcacgtatcatcaaaagacaagttggtatgtatctcaggcttcacgcacaagtcaacatccttatcaccatacctcaatatgacaagccctacctctcaatcttctacaaagctatagatcttccatctcaatgcaaggaacttcaacacacgtataa

SEQ ID NO: 516 - DNA, 200 bp, Amaranthus palmeri
ttatacgtgtgttgaagttccttgcattgagatggaagatctatagctttgtagaagattgagaggtagggcttgtcatattgaggtatggtgataaggatgttgacttgtgcgtgaagcctgagatacataccaacttgtcttttgatgatacgtgcaagatgaaaaaggtctatgaaacataaggatctaagaagagt

SEQ ID NO: 517 - DNA, 200 bp, Amaranthus palmeri
gcaaggaacttcaacacacgtataaactttttttgaatttaattgttcaaaggaaaaaacctttctttcatgtgcatttttatgtcaacatagctattaatcaacgtctttcctcttgtacgagctaattctcaatacctttaagcccacatgaagccttcttcttgagcttgaatttaaaaaactggaaaatttgcttt

SEQ ID NO: 518 - DNA, 200 bp, Amaranthus palmeri
aaagcaaattttccagttttttaaattcaagctcaagaagaaggcttcatgtgggcttaaaggtattgagaattagctcgtacaagaggaaagacgttgattaatagctatgttgacataaaaatgcacatgaaagaaaggttttttcctttgaacaattaaattcaaaaaaagtttatacgtgtgttgaagttccttgc

SEQ ID NO: 519 - DNA, 200 bp, Amaranthus palmeri
tttaaaaaactggaaaatttgcttttcgtacggagttcttgttgttgtaaaaacactccgaacttctctcctattcacgatgatcttttgggtgtaaggacatactatcaaaattttctacgttatcctgaagccatgatcatccacctcgcaatatgctcaactttcagttcacgctgattcaatatctgcgtgaatag

SEQ ID NO: 520 - DNA, 200 bp, Amaranthus palmeri
ctattcacgcagatattgaatcagcgtgaactgaaagttgagcatattgcgaggtggatgatcatggcttcaggataacgtagaaaattttgatagtatgtccttacacccaaaagatcatcgtgaataggagagaagttcggagtgtttttacaacaacaagaactccgtacgaaaagcaaattttccagttttttaaa

SEQ ID NO: 521 - DNA, 200 bp, Amaranthus palmeri
gctgattcaatatctgcgtgaatagattgatcaagcttgccatttgctcaagaatagttgagttttcctcttgtaatactcgattcctctcttctgtttttttagtcatcctactatttgctagcgacaatctcacaagaatataagaggggattctcatctattataacgcactactctgtacctaaggaactagtgtg

SEQ ID NO: 522 - DNA, 200 bp, Amaranthus palmeri
cacactagttccttaggtacagagtagtgcgttataatagatgagaatcccctcttatattcttgtgagattgtcgctagcaaatagtaggatgactaaaaaaacagaagagaggaatcgagtattacaagaggaaaactcaactattcttgagcaaatggcaagcttgatcaatctattcacgcagatattgaatcagc

SEQ ID NO: 523 - DNA, 200 bp, Amaranthus palmeri
actctgtacctaaggaactagtgtgggtgtcttatttttgtcctctcctcgtaggatataaaagagatgtgtatttgtgaatgattcaacataaaacaaaagtatgtaggctcttagattataccatctcattaacatatgatgaactcttacatatgctccttcacatatatttgtttttttggggtcatttattctag

SEQ ID NO: 524 - DNA, 200 bp, Amaranthus palmeri
ctagaataaatgaccccaaaaaaacaaatatatgtgaaggagcatatgtaagagttcatcatatgttaatgagatggtataatctaagagcctacatacttttgttttatgttgaatcattcacaaatacacatctcttttatatcctacgaggagaggacaaaaataagacacccacactagttccttaggtacagagt

SEQ ID NO: 525 - DNA, 200 bp, Amaranthus palmeri
gtttttttggggtcatttattctagtagtccattgatattgaatcccttagttatggcattattgtccgtgcactgtctcaggagaatagatggattgttattgctttttctgtatctgatggtaatacaaagattgcaacatttgctagaccttgctgtttggatatagaaagaaaattatttgccattcatttccaag

SEQ ID NO: 526 - DNA, 200 bp, Amaranthus palmeri
cttggaaatgaatggcaaataattttctttctatatccaaacagcaaggtctagcaaatgttgcaatctttgtattaccatcagatacagaaaaagcaataacaatccatctattctcctgagacagtgcacggacaataatgccataactaagggattcaatatcaatggactactagaataaatgaccccaaaaaaac

SEQ ID NO: 527 - DNA, 200 bp, Amaranthus palmeri
aaattatttgccattcatttccaaggggtcgaatgtagccttatccttattcgtgataacaaagagattgatttgtagtccttacatttgaaaatcctggacttcactgaatttatgtaactgttgcatgccatgaaatggaatactttattgattatgtgtttgggatatgtaagctgaagaaggcaatttcccagctc

SEQ ID NO: 528 - DNA, 200 bp, Amaranthus palmeri
gagctgggaaattgccttcttcagcttacatatcccaaacacataatcaataaagtattccatttcatggcatgcaacagttacataaattcagtgaagtccaggattttcaaatgtaaggactacaaatcaatctctttgttatcacgaataaggataaggctacattcgaccccttggaaatgaatggcaaataattt

SEQ ID NO: 529 - DNA, 200 bp, Amaranthus palmeri
gctgaagaaggcaatttcccagctcctattaatgctatctacacttcatattatcctttctgatatagtttacttttctttgcatgtgtcgaattagttatgtgcttgatggagtaccaagaatgagggagcgccccattggggatctggtagcaggtctaaagcaacttggttcagatgtagattgttttcttggcaca

SEQ ID NO: 530 - DNA, 200 bp, Amaranthus palmeri
tgtgccaagaaaacaatctacatctgaaccaagttgctttagacctgctaccagatccccaatggggcgctccctcattcttggtactccatcaagcacataactaattcgacacatgcaaagaaaagtaaactatatcagaaaggataatatgaagtgtagatagcattaataggagctgggaaattgccttcttcagc

SEQ ID NO: 531 - DNA, 200 bp, Amaranthus palmeri
agatgtagattgttttcttggcacaaattgccctcctgttcgggtcaatgctaaaggaggccttccagggggcaaggtaatgtgactaaacttctttatgttttgttagattttgggttttactccatctaattcaatgaatgatgattcatgcgtcaatttcttggtagcaattcctttccctacctaactatgacttc

SEQ ID NO: 532 - DNA, 200 bp, Amaranthus palmeri
gaagtcatagttaggtagggaaaggaattgctaccaagaaattgacgcatgaatcatcattcattgaattagatggagtaaaacccaaaatctaacaaaacataaagaagtttagtcacattaccttgccccctggaaggcctcctttagcattgacccgaacaggagggcaatttgtgccaagaaaacaatctacatct

SEQ ID NO: 533 - DNA, 200 bp, Amaranthus palmeri
cctttccctacctaactatgacttctctgattgaccttttctatgaggtggggaatagtgtttttaatgtgaggaaaagagaaacccggggtatgagctttagcatgatagagtatgtatttgatactaaaactgcaaattaagttggaatcaagaataagaagacttatacagtataaatcaacagaggtgtctgctgt

SEQ ID NO: 534 - DNA, 200 bp, Amaranthus palmeri
acagcagacacctctgttgatttatactgtataagtcttcttattcttgattccaacttaatttgcagttttagtatcaaatacatactctatcatgctaaagctcataccccgggtttctcttttcctcacattaaaaacactattccccacctcatagaaaaggtcaatcagagaagtcatagttaggtagggaaagg

SEQ ID NO: 535 - DNA, 200 bp, Amaranthus palmeri
ataaatcaacagaggtgtctgctgtgtatatgtgtaatagacagttatagttagcaggaattcaggagataaaatgaagatggtgttgatgaaacttaacagacaattcagaaaacaaagtttgagtagtaagtagacttttgagaggctgcttctctctcaaatgagctataagttctaacaaaagtctcaatacataa

SEQ ID NO: 536 - DNA, 200 bp, Amaranthus palmeri
ttatgtattgagacttttgttagaacttatagctcatttgagagagaagcagcctctcaaaagtctacttactactcaaactttgttttctgaattgtctgttaagtttcatcaacaccatcttcattttatctcctgaattcctgctaactataactgtctattacacatatacacagcagacacctctgttgatttat

SEQ ID NO: 537 - DNA, 200 bp, Amaranthus palmeri
ttctaacaaaagtctcaatacataatttagataataatcagatgcctctctcacgctccatccctttattatctagatttcttgattttttttcataacttatgcaacttatttcagcctcttccttcattccaccttctacttgaaataaaatgcaatctctaccttgtttctttatggtttgttcattttaataaaga

SEQ ID NO: 538 - DNA, 200 bp, Amaranthus palmeri
tctttattaaaatgaacaaaccataaagaaacaaggtagagattgcattttatttcaagtagaaggtggaatgaaggaagaggctgaaataagttgcataagttatgaaaaaaaatcaagaaatctagataataaagggatggagcgtgagagaggcatctgattattatctaaattatgtattgagacttttgttagaa

SEQ ID NO: 539 - DNA, 200 bp, Amaranthus palmeri
tatggtttgttcattttaataaagatttagtatgaaagtcaatattgcttttgcattgttgtttgtctaagatcctaatggcaagtccacataagatgtttgttggtatatgctaggttattaggatcgggattctacttaggatcgttgaggaggtaggattgaaataggtagaatcggttcgtacttcgtaggattgt

SEQ ID NO: 540 - DNA, 200 bp, Amaranthus palmeri
acaatcctacgaagtacgaaccgattctacctatttcaatcctacctcctcaacgatcctaagtagaatcccgatcctaataacctagcatataccaacaaacatcttatgtggacttgccattaggatcttagacaaacaacaatgcaaaagcaatattgactttcatactaaatctttattaaaatgaacaaaccata

SEQ ID NO: 541 - DNA, 200 bp, Amaranthus palmeri
atcggttcgtacttcgtaggattgtgccatgctacaaatatgcattgatgtgctttggattatttgttatcaattatatttgttcttctgttcagttttaaggtgtaagtaaaaacttattcgatttcatttattaagttttgaaaaaaatactttaataatcacttttaaactgcaaattgaaaaaaaattgcattttt

SEQ ID NO: 542 - DNA, 200 bp, Amaranthus palmeri
aaaaatgcaattttttttcaatttgcagtttaaaagtgattattaaagtatttttttcaaaacttaataaatgaaatcgaataagtttttacttacaccttaaaactgaacagaagaacaaatataattgataacaaataatccaaagcacatcaatgcatatttgtagcatggcacaatcctacgaagtacgaaccgat

SEQ ID NO: 543 - DNA, 200 bp, Amaranthus palmeri
caaattgaaaaaaaattgcattttttagtgatgtttttttttttttgaatatcagtgatgttgatataattattttatagaatatttatacataattgaaatcttgattatatgaaaatactttacgattgaaactacttttataggatcggatcgtttgattgtaggatcttagaatcgtattatgatcctaccaccta

SEQ ID NO: 544 - DNA, 200 bp, Amaranthus palmeri
taggtggtaggatcataatacgattctaagatcctacaatcaaacgatccgatcctataaaagtagtttcaatcgtaaagtattttcatataatcaagatttcaattatgtataaatattctataaaataattatatcaacatcactgatattcaaaaaaaaaaaaacatcactaaaaaatgcaattttttttcaatttg

SEQ ID NO: 545 - DNA, 200 bp, Amaranthus palmeri
aatcgtattatgatcctaccacctaaatttttgagctagttctaccacattatgactctacctaagatccggatcgattgtttatttttagatcgtagaatcgtagatcaaaatcgagactctaatatctatgggtatatgtgttaaattattagtcagtagaacaattctctttttcttggtaaataaaatcgtacgat

SEQ ID NO: 546 - DNA, 200 bp, Amaranthus palmeri
atcgtacgattttatttaccaagaaaaagagaattgttctactgactaataatttaacacatatacccatagatattagagtctcgattttgatctacgattctacgatctaaaaataaacaatcgatccggatcttaggtagagtcataatgtggtagaactagctcaaaaatttaggtggtaggatcataatacgatt

SEQ ID NO: 547 - DNA, 200 bp, Amaranthus palmeri
ttcttggtaaataaaatcgtacgatactttagtccggggggcgcgctttgtgtcctgtacggtaagtatcctgtgacaaaactgtacttcaggtgtcttcttcactcttgggaaagtgtaaatgtcttttgtcccgattaaggaagattttatgagaaattttcccacatgcttggcaccaatttgtttttatttagtag

SEQ ID NO: 548 - DNA, 200 bp, Amaranthus palmeri
ctactaaataaaaacaaattggtgccaagcatgtgggaaaatttctcataaaatcttccttaatcgggacaaaagacatttacactttcccaagagtgaagaagacacctgaagtacagttttgtcacaggatacttaccgtacaggacacaaagcgcgccccccggactaaagtatcgtacgattttatttaccaagaa

SEQ ID NO: 549 - DNA, 200 bp, Amaranthus palmeri
gcaccaatttgtttttatttagtagaagaagaaattatgtataacatgcatactcaggatggtagtgaatatgaaatgaagaaaggaggtaaagttgcatgctggaaacttataaagagatgattcattcaaaattttgatattcctaatagcatagttgtggttttcaatttcacagtcatgaagtaagaacctctcta

SEQ ID NO: 550 - DNA, 200 bp, Amaranthus palmeri
tagagaggttcttacttcatgactgtgaaattgaaaaccacaactatgctattaggaatatcaaaattttgaatgaatcatctctttataagtttccagcatgcaactttacctcctttcttcatttcatattcactaccatcctgagtatgcatgttatacataatttcttcttctactaaataaaaacaaattggtgc

SEQ ID NO: 551 - DNA, 200 bp, Amaranthus palmeri
cagtcatgaagtaagaacctctctaatattatccatttgttttgtgaattgatcaaattagaactacaatttcaatgtttgttgttaatgagaagttctagcatagttgtggttttcaatttcacagtcatgaagtaagaacctctctaatattatcgatttgttttgtaaactgtttgcaggtcaagctctctggatcg

SEQ ID NO: 552 - DNA, 200 bp, Amaranthus palmeri
cgatccagagagcttgacctgcaaacagtttacaaaacaaatcgataatattagagaggttcttacttcatgactgtgaaattgaaaaccacaactatgctagaacttctcattaacaacaaacattgaaattgtagttctaatttgatcaattcacaaaacaaatggataatattagagaggttcttacttcatgactg

SEQ ID NO: 553 - DNA, 200 bp, Amaranthus palmeri
tttgcaggtcaagctctctggatcggttagtagccaatatttaactgcacttctcatggctactcctttgggtcttggagacgtggagattgagatagttgataaattgatttctgtaccgtatgttgaaatgacaataaagttgatggaacgctttggagtatccgtagaacatagtgatagttgggacaggttctaca

SEQ ID NO: 554 - DNA, 200 bp, Amaranthus palmeri
tgtagaacctgtcccaactatcactatgttctacggatactccaaagcgttccatcaactttattgtcatttcaacatacggtacagaaatcaatttatcaactatctcaatctccacgtctccaagacccaaaggagtagccatgagaagtgcagttaaatattggctactaaccgatccagagagcttgacctgcaaa

SEQ ID NO: 555 - DNA, 200 bp, Amaranthus palmeri
agtgatagttgggacaggttctacattcgaggtggtcagaaatacaagtaagtctctcatcttatattacatgtccttttaacgtgtctccattagtagactgaaaacacatgtaaatacatcagatctcctggaaaggcatatgttgagggtgatgcttcaagtgctagctacttcctagccggagccgccgtcactgg

SEQ ID NO: 556 - DNA, 200 bp, Amaranthus palmeri
ccagtgacggcggctccggctaggaagtagctagcacttgaagcatcaccctcaacatatgcctttccaggagatctgatgtatttacatgtgttttcagtctactaatggagacacgttaaaaggacatgtaatataagatgagagacttacttgtatttctgaccacctcgaatgtagaacctgtcccaactatcact

SEQ ID NO: 557 - DNA, 200 bp, Amaranthus palmeri
tcctagccggagccgccgtcactggtgggactgtcactgtcaagggttgtggaacaagcagtttacaggtataatgttaacccttacccttcacattgttctgctaaattctagaggaccctttcaattctgggtgggataagcacggcaatttgaccgcaaaaaaattgcaaaattattctgctgatagaacatctcga

SEQ ID NO: 558 - DNA, 200 bp, Amaranthus palmeri
tcgagatgttctatcagcagaataattttgcaatttttttgcggtcaaattgccgtgcttatcccacccagaattgaaagggtcctctagaatttagcagaacaatgtgaagggtaagggttaacattatacctgtaaactgcttgttccacaacccttgacagtgacagtcccaccagtgacggcggctccggctagga

SEQ ID NO: 559 - DNA, 200 bp, Amaranthus palmeri
ttattctgctgatagaacatctcgagatgagatcatattgagttttggcgtcaacataaacctaatcaaataatgaaaaatacaaacatcatatggtttcttttgtctttatgactagacactctctattattccttgattgggatcttatttgaaattgctgtgtagcctacacctcatgttcagattttgttcgtata

SEQ ID NO: 560 - DNA, 200 bp, Amaranthus palmeri
tatacgaacaaaatctgaacatgaggtgtaggctacacagcaatttcaaataagatcccaatcaaggaataatagagagtgtctagtcataaagacaaaagaaaccatatgatgtttgtatttttcattatttgattaggtttatgttgacgccaaaactcaatatgatctcatctcgagatgttctatcagcagaataa

SEQ ID NO: 561 - DNA, 200 bp, Amaranthus palmeri
ctcatgttcagattttgttcgtataccagacttttcttgattgggatcttatttgtcccctggattttgcatagggtgatgtaaaatttgccgaagttcttgagaagatgggttgcaaggtcacctggacagagaatagtgtaactgttactggaccacccagggattcatctggaaagaaacatctgcgtgctatcgac

SEQ ID NO: 562 - DNA, 200 bp, Amaranthus palmeri
gtcgatagcacgcagatgtttctttccagatgaatccctgggtggtccagtaacagttacactattctctgtccaggtgaccttgcaacccatcttctcaagaacttcggcaaattttacatcaccctatgcaaaatccaggggacaaataagatcccaatcaagaaaagtctggtatacgaacaaaatctgaacatgag

SEQ ID NO: 563 - DNA, 200 bp, Amaranthus palmeri
aaagaaacatctgcgtgctatcgacgtcaacatgaacaaaatgccagatgttgctatgactcttgcagttgttgccttgtatgcagatgggcccaccgccatcagagatggtatgcttaactcttttcattgaactgtggcttatgtagactctttcaaatattgataatgaaatttagtgtgtcataagaaaatcggaa

SEQ ID NO: 564 - DNA, 200 bp, Amaranthus palmeri
ttccgattttcttatgacacactaaatttcattatcaatatttgaaagagtctacataagccacagttcaatgaaaagagttaagcataccatctctgatggcggtgggcccatctgcatacaaggcaacaactgcaagagtcatagcaacatctggcattttgttcatgttgacgtcgatagcacgcagatgtttcttt

SEQ ID NO: 565 - DNA, 200 bp, Amaranthus palmeri
ttagtgtgtcataagaaaatcggaatttggacttgtttttgttttggaatattcaaacagctagaaagatgttttttttgctctaatggtggttaaactatcactgtccttgatgggaaattatgatttttgctgtccccaatgtgtttattggcatatcttgatacaattaagtgagggaccactttgcaccattaagt

SEQ ID NO: 566 - DNA, 200 bp, Amaranthus palmeri
acttaatggtgcaaagtggtccctcacttaattgtatcaagatatgccaataaacacattggggacagcaaaaatcataatttcccatcaaggacagtgatagtttaaccaccattagagcaaaaaaaacatctttctagctgtttgaatattccaaaacaaaaacaagtccaaattccgattttcttatgacacactaa

SEQ ID NO: 567 - DNA, 200 bp, Amaranthus palmeri
gagggaccactttgcaccattaagtttctcatagtcatcaccatttctaaataattaaaatttagtattttgtagacttgttatgaaatgacgttaatttttaacaatacttaatggtcttaaaggggtgtttgggaaatgactgctgattaaaattgttttgactagatgatttttatcaactgatttgacctattgaa

SEQ ID NO: 568 - DNA, 200 bp, Amaranthus palmeri
ttcaataggtcaaatcagttgataaaaatcatctagtcaaaacaattttaatcagcagtcatttcccaaacacccctttaagaccattaagtattgttaaaaattaacgtcatttcataacaagtctacaaaatactaaattttaattatttagaaatggtgatgactatgagaaacttaatggtgcaaagtggtccctc

SEQ ID NO: 569 - DNA, 200 bp, Amaranthus palmeri
ttatcaactgatttgacctattgaatttgaacatgcttttaggaatagcttgttcaaaaatagcttcttcagaacaataagttgtttcaatcaactaatataccaaacactaaccaattatttacaattgtgccaaaataagctaaaattgtcaaatcaactattatgcaacctcaggatgtgttccggggatatgaatt

SEQ ID NO: 570 - DNA, 200 bp, Amaranthus palmeri
aattcatatccccggaacacatcctgaggttgcataatagttgatttgacaattttagcttattttggcacaattgtaaataattggttagtgtttggtatattagttgattgaaacaacttattgttctgaagaagctatttttgaacaagctattcctaaaagcatgttcaaattcaataggtcaaatcagttgataa

SEQ ID NO: 571 - DNA, 200 bp, Amaranthus palmeri
aggatgtgttccggggatatgaattgaaacccatctttggcagagtagagataagacgaaaattgatccaatcttagggatgaatgttgagatattatttccataaatatactgtggtggcatttagggttttttatttaacaaggggtgtttagtttggagaactttttattgaaaacctgttttctccatattcccat

SEQ ID NO: 572 - DNA, 200 bp, Amaranthus palmeri
atgggaatatggagaaaacaggttttcaataaaaagttctccaaactaaacaccccttgttaaataaaaaaccctaaatgccaccacagtatatttatggaaataatatctcaacattcatccctaagattggatcaattttcgtcttatctctactctgccaaagatgggtttcaattcatatccccggaacacatcct

SEQ ID NO: 573 - DNA, 200 bp, Amaranthus palmeri
aaacctgttttctccatattcccatactgggttgacaatgaaaatttgaaaattagggttgaaaagaattattccttccattattagcttacaaacttatatagttggatgaaaattaaatttcattcactttcactccatctcccttggtagcattatcgtattccatcaaacaaaacaaaagaaaagtagtaataatt

SEQ ID NO: 574 - DNA, 200 bp, Amaranthus palmeri
aattattactacttttcttttgttttgtttgatggaatacgataatgctaccaagggagatggagtgaaagtgaatgaaatttaattttcatccaactatataagtttgtaagctaataatggaaggaataattcttttcaaccctaattttcaaattttcattgtcaacccagtatgggaatatggagaaaacaggttt

SEQ ID NO: 575 - DNA, 200 bp, Amaranthus palmeri
aaacaaaagaaaagtagtaataattaacgtttaattggaaaattgtttctcatggaaaatgttctccgccagaccaaatactttcggaacgaggaagcattttggaataaagaaccttgtgcttggattaatatatttgtctatgagatagttttctctagagtttacttgtatgtttattaactgaacacgcctccttt

SEQ ID NO: 576 - DNA, 200 bp, Amaranthus palmeri
aaaggaggcgtgttcagttaataaacatacaagtaaactctagagaaaactatctcatagacaaatatattaatccaagcacaaggttctttattccaaaatgcttcctcgttccgaaagtatttggtctggcggagaacattttccatgagaaacaattttccaattaaacgttaattattactacttttcttttgttt

SEQ ID NO: 577 - DNA, 200 bp, Amaranthus palmeri
tttattaactgaacacgcctcctttgcaatcaaagaaaaaggaattatttcacctctaagcataccgaaaacatcgacgcaaaatacatgtcaagatgtgtaatgattttgttatgtgaattaacagtggctagctggagagtgaaggaaaccgaacggatgattgccatttgcacagaactgagaaaggttagcagcct

SEQ ID NO: 578 - DNA, 200 bp, Amaranthus palmeri
aggctgctaacctttctcagttctgtgcaaatggcaatcatccgttcggtttccttcactctccagctagccactgttaattcacataacaaaatcattacacatcttgacatgtattttgcgtcgatgttttcggtatgcttagaggtgaaataattcctttttctttgattgcaaaggaggcgtgttcagttaataaa

SEQ ID NO: 579 - DNA, 200 bp, Amaranthus palmeri
cagaactgagaaaggttagcagccttttacattctcgaaagctgtaattgttcttgagtaatatatattcaaactataactgatgttattttgcattcctatcaatacattcagcttggggcaacagttgaggaaggatctgattactgtgtgatcactccgcctgaaaagctaaaccccaccgccattgaaacttatga

SEQ ID NO: 580 - DNA, 200 bp, Amaranthus palmeri
tcataagtttcaatggcggtggggtttagcttttcaggcggagtgatcacacagtaatcagatccttcctcaactgttgccccaagctgaatgtattgataggaatgcaaaataacatcagttatagtttgaatatatattactcaagaacaattacagctttcgagaatgtaaaaggctgctaacctttctcagttctg

SEQ ID NO: 581 - DNA, 200 bp, Amaranthus palmeri
accccaccgccattgaaacttatgacgatcaccgaatggccatggcattctctcttgctgcctgtgcagatgttcccgtcactatccttgatccgggatgcacccgtaaaaccttcccggactactttgatgttttagaaaagttcgccaagcattgagtagctatatacgagatccttaaattgtacgccgaaggtttt

SEQ ID NO: 582 - DNA, 200 bp, Amaranthus palmeri
aaaaccttcggcgtacaatttaaggatctcgtatatagctactcaatgcttggcgaacttttctaaaacatcaaagtagtccgggaaggttttacgggtgcatcccggatcaaggatagtgacgggaacatctgcacaggcagcaagagagaatgccatggccattcggtgatcgtcataagtttcaatggcggtggggt

SEQ ID NO: 583 - DNA, 200 bp, Amaranthus palmeri
ccttaaattgtacgccgaaggttttgatttgagtctaatagtagataaaaggctataaataaactggctttctgcttgagtaattatgaaattctttgtattatgtttgtgagattttaagtagcttataaattacaatgtactaaagtctagaaataagttatgtatcttttaaatcaatgagaaatgcatacttgaaa

SEQ ID NO: 584 - DNA, 200 bp, Amaranthus palmeri
tttcaagtatgcatttctcattgatttaaaagatacataacttatttctagactttagtacattgtaatttataagctacttaaaatctcacaaacataatacaaagaatttcataattactcaagcagaaagccagtttatttatagccttttatctactattagactcaaatcaaaaccttcggcgtacaatttaagg

SEQ ID NO: 585 - DNA, 200 bp, Amaranthus palmeri
atcaatgagaaatgcatacttgaaaggcttgaccttgtattcgtgacctaaagagtactaactttggagtttccaagtcatttgtttatctcatttttttttaatttttgatttaaattgtttattttcatgagtaatcatgtatctttcttattctaaccaaatgtaatactccttccaactctctttaaacgtccaca

SEQ ID NO: 586 - DNA, 200 bp, Amaranthus palmeri
tgtggacgtttaaagagagttggaaggagtattacatttggttagaataagaaagatacatgattactcatgaaaataaacaatttaaatcaaaaattaaaaaaaaatgagataaacaaatgacttggaaactccaaagttagtactctttaggtcacgaatacaaggtcaagcctttcaagtatgcatttctcattgat

SEQ ID NO: 587 - DNA, 200 bp, Amaranthus palmeri
ttccaactctctttaaacgtccacactctgggcacagagtgtaatagtgtggtggttggagtcttttaagtgattataataattgtaaatgtggtagttagagtattttaagtaatgtaggtggggtattatggtcttgttgaacataggatatttaggtaaaaaatctatgcaaaaaaaggaaagtaagcaaataaagc

SEQ ID NO: 588 - DNA, 200 bp, Amaranthus palmeri
gctttatttgcttactttcctttttttgcatagattttttacctaaatatcctatgttcaacaagaccataataccccacctacattacttaaaatactctaactaccacatttacaattattataatcacttaaaagactccaaccaccacactattacactctgtgcccagagtgtggacgtttaaagagagttggaa

SEQ ID NO: 589 - DNA, 200 bp, Amaranthus palmeri
aaaaaggaaagtaagcaaataaagcgaattgacctgaaaagaaaagtggacatgtatagtgagttggaggaagtatttttaatttcggcaaattaatcttaaatgtcgtattttcttttatgataagtttttcgaatacttttactttcatgggacaactttaccattaatatcatcctcacttaccccatttaacaatc

SEQ ID NO: 590 - DNA, 200 bp, Amaranthus palmeri
gattgttaaatggggtaagtgaggatgatattaatggtaaagttgtcccatgaaagtaaaagtattcgaaaaacttatcataaaagaaaatacgacatttaagattaatttgccgaaattaaaaatacttcctccaactcactatacatgtccacttttcttttcaggtcaattcgctttatttgcttactttccttttt

SEQ ID NO: 591 - DNA, 200 bp, Amaranthus palmeri
tcctcacttaccccatttaacaatcaactgacataataattaaaacataaatctaatcttaaagttttggtctaatgtctcaataatgattaattttatcggacagatgccctcaataagtacttaaaattaatccattgtttttgcatgctttacttaaatgtttaatgataaataacttttggtctaaattctttagg

SEQ ID NO: 592 - DNA, 200 bp, Amaranthus palmeri
cctaaagaatttagaccaaaagttatttatcattaaacatttaagtaaagcatgcaaaaacaatggattaattttaagtacttattgagggcatctgtccgataaaattaatcattattgagacattagaccaaaactttaagattagatttatgttttaattattatgtcagttgattgttaaatggggtaagtgagga

SEQ ID NO: 593 - DNA, 200 bp, Amaranthus palmeri
taacttttggtctaaattctttaggaaataaacgctaaaaaagatttagaaacagtccctattaaactaatttgttacttatatttacaaaagtttctatttgttccatgaaatgtatactacaaaaacttgatatttttgcttgtcatgttcattttcatttggtttgcaaaatgttgtttatattgattttgtgatgt

SEQ ID NO: 594 - DNA, 200 bp, Amaranthus palmeri
acatcacaaaatcaatataaacaacattttgcaaaccaaatgaaaatgaacatgacaagcaaaaatatcaagtttttgtagtatacatttcatggaacaaatagaaacttttgtaaatataagtaacaaattagtttaatagggactgtttctaaatcttttttagcgtttatttcctaaagaatttagaccaaaagtta

SEQ ID NO: 595 - DNA, 200 bp, Amaranthus palmeri
gttgtttatattgattttgtgatgtttatctgatcttcaatgcaccaaggaaaaatataacttttcattttgttgtgctaccaaagtccattagtatttaaagtatggcaagaaaaaaagataaacagttgctgaagacgtcaattaaatttcgattaaagatcaaactaaaattgataaaaagatgtaagatgtttgtt

SEQ ID NO: 596 - DNA, 200 bp, Amaranthus palmeri
aacaaacatcttacatctttttatcaattttagtttgatctttaatcgaaatttaattgacgtcttcagcaactgtttatctttttttcttgccatactttaaatactaatggactttggtagcacaacaaaatgaaaagttatatttttccttggtgcattgaagatcagataaacatcacaaaatcaatataaacaac

SEQ ID NO: 597 - DNA, 200 bp, Amaranthus palmeri
gataaaaagatgtaagatgtttgttattatgtaatacaatttgacgtagtttttgacgtttttatttaaatataaaaattggcctatttttaatttaactgttgtttgcgttttcgaaaatcctaattttcacgcatttaaagactttttatgtaatgaaaaataattagagttttaaaaaagtaaacctcctttaatat

SEQ ID NO: 598 - DNA, 200 bp, Amaranthus palmeri
atattaaaggaggtttacttttttaaaactctaattatttttcattacataaaaagtctttaaatgcgtgaaaattaggattttcgaaaacgcaaacaacagttaaattaaaaataggccaatttttatatttaaataaaaacgtcaaaaactacgtcaaattgtattacataataacaaacatcttacatctttttatc

SEQ ID NO: 599 - DNA, 200 bp, Amaranthus palmeri
taaaaaagtaaacctcctttaatatagacccaaaagagacccaaagagaacgcaacacattgcctaagagaaaaaagtatgagttgatcaataataaaaaaaatttcgatcaatatctctcttaaaactatgaggcatgagcaatgacaacctattttagtttcctaaataaaatttggaggattggtagttcccatggc

SEQ ID NO: 600 - DNA, 200 bp, Amaranthus palmeri
gccatgggaactaccaatcctccaaattttatttaggaaactaaaataggttgtcattgctcatgcctcatagttttaagagagatattgatcgaaattttttttattattgatcaactcatacttttttctcttaggcaatgtgttgcgttctctttgggtctcttttgggtctatattaaaggaggtttactttttta

SEQ ID NO: 601 - DNA, 200 bp, Amaranthus rudis
aaagatggaaaggaagagattcaacttttccttggaaatgcaggaacagcgatgcgcccattgacagctgcggttgccgttgctggaggaaattcaaggtttgtccaattatatattttatgcgagtgtgatttttgtaatattacttttttttttgtgctagtttcaatcatgaagctgctaatgcagaagtgttgtaa

SEQ ID NO: 602 - DNA, 200 bp, Amaranthus rudis
ttacaacacttctgcattagcagcttcatgattgaaactagcacaaaaaaaaaagtaatattacaaaaatcacactcgcataaaatatataattggacaaaccttgaatttcctccagcaacggcaaccgcagctgtcaatgggcgcatcgctgttcctgcatttccaaggaaaagttgaatctcttcctttccatcttt

SEQ ID NO: 603 - DNA, 200 bp, Amaranthus rudis
agctgctaatgcagaagtgttgtaacctcgcgaatattaaactattgtgctatcacattaacttttgatcaaagatgtacactgtgtttgtatagtttatagagctaaagggatggaaggggtcgggagagaagaagaggagaaaagaagaagatcctccatatgtataccaagtgtttgaacggaaggaagaaggagga

SEQ ID NO: 604 - DNA, 200 bp, Amaranthus rudis
tcctccttcttccttccgttcaaacacttggtatacatatggaggatcttcttcttttctcctcttcttctctcccgaccccttccatccctttagctctataaactatacaaacacagtgtacatctttgatcaaaagttaatgtgatagcacaatagtttaatattcgcgaggttacaacacttctgcattagcagct

SEQ ID NO: 605 - DNA, 200 bp, Amaranthus rudis
gtttgaacggaaggaagaaggaggaaactctacacaatatggagatgaagtttttggatagaagccgcttgagaatgagagttaattcatgtgaaagtctatgagaatgagttcacctgcttaataattttaagctctcaacttctcatcctcttttctttgtcaaaaatatcatgtcttcatgtgataattgcttacat

SEQ ID NO: 606 - DNA, 200 bp, Amaranthus rudis
atgtaagcaattatcacatgaagacatgatatttttgacaaagaaaagaggatgagaagttgagagcttaaaattattaagcaggtgaactcattctcatagactttcacatgaattaactctcattctcaagcggcttctatccaaaaacttcatctccatattgtgtagagtttcctccttcttccttccgttcaaac

SEQ ID NO: 607 - DNA, 200 bp, Amaranthus rudis
gtcttcatgtgataattgcttacataatcgattattttgtaaagcggttgtctctctaaatctctccacttacgaaaataattcttccttgaaggttgaagaaatcccttcatttccttttcctctatttctccacccttcctactttggtgtagcatttagtatccctccatttccatggcctatagtgttagatatat

SEQ ID NO: 608 - DNA, 200 bp, Amaranthus rudis
atatatctaacactataggccatggaaatggagggatactaaatgctacaccaaagtaggaagggtggagaaatagaggaaaaggaaatgaagggatttcttcaaccttcaaggaagaattattttcgtaagtggagagatttagagagacaaccgctttacaaaataatcgattatgtaagcaattatcacatgaagac

SEQ ID NO: 609 - DNA, 200 bp, Amaranthus rudis
ccatggcctatagtgttagatatattcaaacttaagcatctcatgttttatgtgggttctaattgttatttatatatgcatttccaaggattcaaggtaattcgaaccaatcaagcccaaaacaggatatgaattcttcaacctagtctgaacttgtacatctgaaacatactagttgtaattgaaatatactcaactgt

SEQ ID NO: 610 - DNA, 200 bp, Amaranthus rudis
acagttgagtatatttcaattacaactagtatgtttcagatgtacaagttcagactaggttgaagaattcatatcctgttttgggcttgattggttcgaattaccttgaatccttggaaatgcatatataaataacaattagaacccacataaaacatgagatgcttaagtttgaatatatctaacactataggccatgg

SEQ ID NO: 611 - DNA, 200 bp, Amaranthus rudis
ttgtaattgaaatatactcaactgtaataggactctcaccttcattgtaggttgccacatagcacgtattgtcgatccacccatccttattatttgacacatcaaataaaggatccactcacgtggaactcctaccctacaaaataaaccatcttcctcatctcatttgtattcacgtagttgcttcctcaatcctacaa

SEQ ID NO: 612 - DNA, 200 bp, Amaranthus rudis
ttgtaggattgaggaagcaactacgtgaatacaaatgagatgaggaagatggtttattttgtagggtaggagttccacgtgagtggatcctttatttgatgtgtcaaataataaggatgggtggatcgacaatacgtgctatgtggcaacctacaatgaaggtgagagtcctattacagttgagtatatttcaattacaa

SEQ ID NO: 613 - DNA, 200 bp, Amaranthus rudis
cgtagttgcttcctcaatcctacaagtaaaaggagaattgtgattcaacttttggagtttggacctattttactgtcaatcaacgaatattaggacaatcacattggtcgcttggcgcttgaaacatttgatttcctcaaaatcctttgcttcccccaacttttcatccttttctttccacattaaagtaggtgcccgaa

SEQ ID NO: 614 - DNA, 200 bp, Amaranthus rudis
ttcgggcacctactttaatgtggaaagaaaaggatgaaaagttgggggaagcaaaggattttgaggaaatcaaatgtttcaagcgccaagcgaccaatgtgattgtcctaatattcgttgattgacagtaaaataggtccaaactccaaaagttgaatcacaattctccttttacttgtaggattgaggaagcaactacg

SEQ ID NO: 615 - DNA, 200 bp, Amaranthus rudis
ttccacattaaagtaggtgcccgaacctccatagccacaaacttggttgtagacgacatgccaacctttctacctttaataaagataggatttgtaaaagccttgctcttcttagatccttatctttcatagaccattgtcatcttgtacatatcatcaaaagacaagttggtatgtaactcaggcttctcgcacaaatt

SEQ ID NO: 616 - DNA, 200 bp, Amaranthus rudis
aatttgtgcgagaagcctgagttacataccaacttgtcttttgatgatatgtacaagatgacaatggtctatgaaagataaggatctaagaagagcaaggcttttacaaatcctatctttattaaaggtagaaaggttggcatgtcgtctacaaccaagtttgtggctatggaggttcgggcacctactttaatgtggaa

SEQ ID NO: 617 - DNA, 200 bp, Amaranthus rudis
gtaactcaggcttctcgcacaaattaacatccttctcaccaatgaacctccctagtagaaatgcctctcgtacctcaatatgacaagccctacctctcaaacttccacaaagctatagatcttccatcctgatgcaaggaacttcaacgcacatgtaaatgtggtttgaattttaatgttcaaaggaaaaaacctttgtt

SEQ ID NO: 618 - DNA, 200 bp, Amaranthus rudis
aacaaaggttttttcctttgaacattaaaattcaaaccacatttacatgtgcgttgaagttccttgcatcaggatggaagatctatagctttgtggaagtttgagaggtagggcttgtcatattgaggtacgagaggcatttctactagggaggttcattggtgagaaggatgttaatttgtgcgagaagcctgagttac

SEQ ID NO: 619 - DNA, 200 bp, Amaranthus rudis
atgttcaaaggaaaaaacctttgtttcatgtgcatctttatgtcagcatagctattaatcagcttcttttctcttgcactagctatactctatacatttaagccaacaagaagcttgcttcttgagctcaagtttaacaaacttgaaaattcaatttttgggtggagttcttgtcgtaaaaacactccaaacttctctcc

SEQ ID NO: 620 - DNA, 200 bp, Amaranthus rudis
ggagagaagtttggagtgtttttacgacaagaactccacccaaaaattgaattttcaagtttgttaaacttgagctcaagaagcaagcttcttgttggcttaaatgtatagagtatagctagtgcaagagaaaagaagctgattaatagctatgctgacataaagatgcacatgaaacaaaggttttttcctttgaacat

SEQ ID NO: 621 - DNA, 200 bp, Amaranthus rudis
gtaaaaacactccaaacttctctcctattcaagataatcttttgggtgtaaggacatactatctaaattttctacgtcatcttgaagccatggtcatccacctagcaatctgctcaactctcggttcatgtttattcaacatctgtgtgaatagattgatcaagcttgccatctgctcaaggatagttgagttattctct

SEQ ID NO: 622 - DNA, 200 bp, Amaranthus rudis
agagaataactcaactatccttgagcagatggcaagcttgatcaatctattcacacagatgttgaataaacatgaaccgagagttgagcagattgctaggtggatgaccatggcttcaagatgacgtagaaaatttagatagtatgtccttacacccaaaagattatcttgaataggagagaagtttggagtgtttttac

SEQ ID NO: 623 - DNA, 200 bp, Amaranthus rudis
ctcaaggatagttgagttattctcttgtaatactggattcctctcttatgtttttttagtcatcctactatttgctagcaacaaacaatcttacaagaatataagaggggattctcttgtattataaggcactactcagaacctaaggaagtagtatgggtgtcttatttttgtccttgcctcgtaggacataaaagaga

SEQ ID NO: 624 - DNA, 200 bp, Amaranthus rudis
tctcttttatgtcctacgaggcaaggacaaaaataagacacccatactacttccttaggttctgagtagtgccttataatacaagagaatcccctcttatattcttgtaagattgtttgttgctagcaaatagtaggatgactaaaaaaacataagagaggaatccagtattacaagagaataactcaactatccttgag

SEQ ID NO: 625 - DNA, 200 bp, Amaranthus rudis
cttgcctcgtaggacataaaagagagttgtatttgtgaatgattcaacataaaccaaaagtatgtaggctcttaggttataccatctcattaatatatgatgaaatcttacgtatattccttcacatatatttgtttctttggggtcatttattgtagcaggtcattgatatggaatgccttagttatggcattattgta

SEQ ID NO: 626 - DNA, 200 bp, Amaranthus rudis
tacaataatgccataactaaggcattccatatcaatgacctgctacaataaatgaccccaaagaaacaaatatatgtgaaggaatatacgtaagatttcatcatatattaatgagatggtataacctaagagcctacatacttttggtttatgttgaatcattcacaaatacaactctcttttatgtcctacgaggcaag

SEQ ID NO: 627 - DNA, 200 bp, Amaranthus rudis
atgccttagttatggcattattgtacgtgcactgtctcaggagaatagatggactgtttatgctttttcgctatttgatggtaatacaaagattgcaatatttgcaagaccttgctgttcggatatagagcaaaatctattacctcgatgccattaattttgaagggatcgaatgtatccttatccttattcatgataac

SEQ ID NO: 628 - DNA, 200 bp, Amaranthus rudis
gttatcatgaataaggataaggatacattcgatcccttcaaaattaatggcatcgaggtaatagattttgctctatatccgaacagcaaggtcttgcaaatattgcaatctttgtattaccatcaaatagcgaaaaagcataaacagtccatctattctcctgagacagtgcacgtacaataatgccataactaaggcat

SEQ ID NO: 629 - DNA, 200 bp, Amaranthus rudis
tatccttatccttattcatgataacaaagagattgctttgaagtccttacgtttgaaaatcctggacttcactgaattaatgtaaatttcaggttttctgttgcgtgccatgaaatggaatactttattgcttatgtgctgggaataagtaagcttaagaaggcagtttcccaactcctattaatggcacctacacttta

SEQ ID NO: 630 - DNA, 200 bp, Amaranthus rudis
taaagtgtaggtgccattaataggagttgggaaactgccttcttaagcttacttattcccagcacataagcaataaagtattccatttcatggcacgcaacagaaaacctgaaatttacattaattcagtgaagtccaggattttcaaacgtaaggacttcaaagcaatctctttgttatcatgaataaggataaggata

SEQ ID NO: 631 - DNA, 200 bp, Amaranthus rudis
tcctattaatggcacctacactttatattatcctttctgatgtagtttttcttttccttgcatgtgttgatttagctatgttcttgacggagtaccaagaatgagggagcgccccattggggatttggtagcaggtttgaagcaacttggttcagatgttgactgttttcttggcacaaattgccctcctgttcgggtca

SEQ ID NO: 632 - DNA, 200 bp, Amaranthus rudis
tgacccgaacaggagggcaatttgtgccaagaaaacagtcaacatctgaaccaagttgcttcaaacctgctaccaaatccccaatggggcgctccctcattcttggtactccgtcaagaacatagctaaatcaacacatgcaaggaaaagaaaaactacatcagaaaggataatataaagtgtaggtgccattaatagga

SEQ ID NO: 633 - DNA, 200 bp, Amaranthus rudis
acaaattgccctcctgttcgggtcaatgctaaaggaggcctaccagggggcaaggtactgtaattatattttctttttgttaagttagattttgtgttttactccatctaattcgatgaatgatgattcatacgtcaatttcttggtagtacttcctttccctacctaactctgacttctctgattgaccttttctgtga

SEQ ID NO: 634 - DNA, 200 bp, Amaranthus rudis
tcacagaaaaggtcaatcagagaagtcagagttaggtagggaaaggaagtactaccaagaaattgacgtatgaatcatcattcatcgaattagatggagtaaaacacaaaatctaacttaacaaaaagaaaatataattacagtaccttgccccctggtaggcctcctttagcattgacccgaacaggagggcaatttgt

SEQ ID NO: 635 - DNA, 200 bp, Amaranthus rudis
cttctctgattgaccttttctgtgacgtggggaatagagtttttattaagtgaggaaaagagaaacccggtgtatgagctttagcatgacagaatatgtatttgatatttatactgcaaattaagttggaatcaagaataaaatagcttcagttggagacagtttcttttcttgcatgaagtttatacagcataaatcat

SEQ ID NO: 636 - DNA, 200 bp, Amaranthus rudis
atgatttatgctgtataaacttcatgcaagaaaagaaactgtctccaactgaagctattttattcttgattccaacttaatttgcagtataaatatcaaatacatattctgtcatgctaaagctcatacaccgggtttctcttttcctcacttaataaaaactctattccccacgtcacagaaaaggtcaatcagagaag

SEQ ID NO: 637 - DNA, 200 bp, Amaranthus rudis
atgaagtttatacagcataaatcatcagaggtgtctgctgtgtatgtgtaatagactgttatagttagcaggaatgcagtagataaaatgaagatggtgttgataaagcttaacagacaattcaaaaaacaaagtttgagtagtaagtagacttttgaaaggcgtgtttctctcccaaatgagctataagttctaacaaa

SEQ ID NO: 638 - DNA, 200 bp, Amaranthus rudis
tttgttagaacttatagctcatttgggagagaaacacgcctttcaaaagtctacttactactcaaactttgttttttgaattgtctgttaagctttatcaacaccatcttcattttatctactgcattcctgctaactataacagtctattacacatacacagcagacacctctgatgatttatgctgtataaacttcat

SEQ ID NO: 639 - DNA, 200 bp, Amaranthus rudis
caaatgagctataagttctaacaaaagtttgaatacttatcagatgcctctctcacgctctatcccttaattcagatttcttgatttcttttttataactttcccaacttatttccgcctttttcttcatgccaccttttaactgaaataaaatgcaattcctaccttgtttctttaaggcttgtacattttattaagga

SEQ ID NO: 640 - DNA, 200 bp, Amaranthus rudis
tccttaataaaatgtacaagccttaaagaaacaaggtaggaattgcattttatttcagttaaaaggtggcatgaagaaaaaggcggaaataagttgggaaagttataaaaaagaaatcaagaaatctgaattaagggatagagcgtgagagaggcatctgataagtattcaaacttttgttagaacttatagctcatttg

SEQ ID NO: 641 - DNA, 200 bp, Amaranthus rudis
aaatgatgcaaattaattgggattacattttgaagattgatattgaaattgagagagagttaaaatgtatggatgagagggttgcaaatcaaatgagacggagggggtagattagcaaaattaataagttatttgaagattgaatttgtaaaataattgatgaatcgggcattacattttgctcatcccatcctacacca

SEQ ID NO: 642 - DNA, 200 bp, Amaranthus rudis
tggtgtaggatgggatgagcaaaatgtaatgcccgattcatcaattattttacaaattcaatcttcaaataacttattaattttgctaatctaccccctccgtctcatttgatttgcaaccctctcatccatacattttaactctctctcaatttcaatatcaatcttcaaaatgtaatcccaattaatttgcatcattt

SEQ ID NO: 643 - DNA, 200 bp, Amaranthus rudis
attttgctcatcccatcctacaccaaccccaaaacaattcaacaacaaactctttttactacaccaacccactttctctttgcccaccaaaactttggtttggtaagaactaagccctcttctttctctcccccttctccctcttagaaggctaaaatccacctaactttttcagccaagaacacaaagcgaaattcaga

SEQ ID NO: 644 - DNA, 200 bp, Amaranthus rudis
tctgaatttcgctttgtgttcttggctgaaaaagttaggtggattttagccttctaagagggagaagggggagagaaagaagagggcttagttcttaccaaaccaaagttttggtgggcaaagagaaagtgggttggtgtagtaaaaagagtttgttgttgaattgttttggggttggtgtaggatgggatgagcaaaat

SEQ ID NO: 645 - DNA, 200 bp, Amaranthus rudis
ccaagaacacaaagcgaaattcagagataaagagaaacaataatggctcaagctactgccatcaacaatggtgtccaaactggtcaattgcaccatactttacccaaaacccacttacccaaatcttcaaaaattgttaattttggatcaaacttgagaatttctccaaagttcatgtctttaaccattaaaagagttgg

SEQ ID NO: 646 - DNA, 200 bp, Amaranthus rudis
ccaactcttttaatggttaaagacatgaactttggagaaattctcaagtttgatccaaaattaacaatttttgaagatttgggtaagtgggttttgggtaaagtatggtgcaattgaccagtttggacaccattgttgatggcagtagcttgagccattattgtttctctttatctctgaatttcgctttgtgttcttgg

SEQ ID NO: 647 - DNA, 200 bp, Amaranthus rudis
tgtctttaaccattaaaagagttggtgggcaatcatcaattattcccaagattcaagcttcagttgctgctgcagctgagaagccttcatctgtcccagaaattgtgttacaacccatcaaagagatctctggtaccattcaattgcctgggtcaaagtctctatctaatcgaatccttcttttagctgctttgtctgag

SEQ ID NO: 648 - DNA, 200 bp, Amaranthus rudis
ctcagacaaagcagctaaaagaaggattcgattagatagagactttgacccaggcaattgaatggtaccagagatctctttgatgggttgtaacacaatttctgggacagatgaaggcttctcagctgcagcagcaactgaagcttgaatcttgggaataattgatgattgcccaccaactcttttaatggttaaagaca

SEQ ID NO: 649 - DNA, 200 bp, Amaranthus rudis
ccttcttttagctgctttgtctgaggtatttatttctcaactgctaaaactttccaatctctatttgatattggaatttgtattacatattccatcttgttgtaattgcattagtagaaagttatgttttgacctttgttcatttatttgttgaattagtattgttgagaatttgaatgtaattattttttttccaatgt

SEQ ID NO: 650 - DNA, 200 bp, Amaranthus rudis
acattggaaaaaaaataattacattcaaattctcaacaatactaattcaacaaataaatgaacaaaggtcaaaacataactttctactaatgcaattacaacaagatggaatatgtaatacaaattccaatatcaaatagagattggaaagttttagcagttgagaaataaatacctcagacaaagcagctaaaagaagg

SEQ ID NO: 651 - DNA, 200 bp, Amaranthus rudis
aatgtaattattttttttccaatgtgaatttaatctgattaaatccacctcttatttatgttaagttgcaatgaggtttgccaaacggttatcattgaaggataagtttgcgtacttctgaccctcccaacttcgcgttggtagagccatttaatgttattgggggtgattaaaaagatgtatttgttttgccatttgaa

SEQ ID NO: 652 - DNA, 200 bp, Amaranthus rudis
ttcaaatggcaaaacaaatacatctttttaatcacccccaataacattaaatggctctaccaacgcgaagttgggagggtcagaagtacgcaaacttatccttcaatgataaccgtttggcaaacctcattgcaacttaacataaataagaggtggatttaatcagattaaattcacattggaaaaaaaataattacatt

SEQ ID NO: 653 - DNA, 200 bp, Amaranthus rudis
agatgtatttgttttgccatttgaaatagtagcgttcgtgattctgttttgggtgtctttatagatatgatatatgggttattcatgtaatgtgaaggtttatgtaatatcttggatgcatgtctggtgttgtttgttgtaaatggttgaatgttgttatttggatacattttttcatccatttttttttccctttttac

SEQ ID NO: 654 - DNA, 200 bp, Amaranthus rudis
gtaaaaagggaaaaaaaaatggatgaaaaaatgtatccaaataacaacattcaaccatttacaacaaacaacaccagacatgcatccaagatattacataaaccttcacattacatgaataacccatatatcatatctataaagacacccaaaacagaatcacgaacgctactatttcaaatggcaaaacaaatacatct

SEQ ID NO: 655 - DNA, 200 bp, Amaranthus rudis
catccatttttttttccctttttacttggaactggaagagggagggttattgggagtaattgaaaggttgtgagtttgagacagtgcatccaagacgaagaacttgagatagatgttgaaggctaaaccttatcactgcttgaattcattatatatctgaaaattttactatatgcatccgttttgctaataaagtgttt

SEQ ID NO: 656 - DNA, 200 bp, Amaranthus rudis
aaacactttattagcaaaacggatgcatatagtaaaattttcagatatataatgaattcaagcagtgataaggtttagccttcaacatctatctcaagttcttcgtcttggatgcactgtctcaaactcacaacctttcaattactcccaataaccctccctcttccagttccaagtaaaaagggaaaaaaaaatggatg

SEQ ID NO: 657 - DNA, 200 bp, Amaranthus rudis
catccgttttgctaataaagtgtttttggactatcatgttttgtgatgcccaagagggtgatattactgtgataaatggaaatatcataataacatctattgttaagtagttttagaggcttttgattggtgcttcggctttggttttacttacctcctagagaagattgattctggttgtgcaatctgaacattatttc

SEQ ID NO: 658 - DNA, 200 bp, Amaranthus rudis
gaaataatgttcagattgcacaaccagaatcaatcttctctaggaggtaagtaaaaccaaagccgaagcaccaatcaaaagcctctaaaactacttaacaatagatgttattatgatatttccatttatcacagtaatatcaccctcttgggcatcacaaaacatgatagtccaaaaacactttattagcaaaacggatg

SEQ ID NO: 659 - DNA, 200 bp, Amaranthus rudis
ggttgtgcaatctgaacattatttcatcatggtatgaatatggttcaaaaacaaggctgcatcgcattggacacgttgtgaagatttaaaaaaatcgaattgatatttctagcattgtaaaggcttaaataaactgtattccaggctatattagggatctctcatgcttttgaccgatattaaggtgttacgataaccgc

SEQ ID NO: 660 - DNA, 200 bp, Amaranthus rudis
gcggttatcgtaacaccttaatatcggtcaaaagcatgagagatccctaatatagcctggaatacagtttatttaagcctttacaatgctagaaatatcaattcgatttttttaaatcttcacaacgtgtccaatgcgatgcagccttgtttttgaaccatattcataccatgatgaaataatgttcagattgcacaacc

SEQ ID NO: 661 - DNA, 200 bp, Amaranthus rudis
gatattaaggtgttacgataaccgcatcactcctgcaatcgtgaccgcatgttttcactctattatgtgttacaagagattagtgttacatgaagtggatcccctgtgattttgttctaggtggacagtgtttttgccgaattttatggcaggatttataaagagattggatattagggatttgaattttttaaaatgtt

SEQ ID NO: 662 - DNA, 200 bp, Amaranthus rudis
aacattttaaaaaattcaaatccctaatatccaatctctttataaatcctgccataaaattcggcaaaaacactgtccacctagaacaaaatcacaggggatccacttcatgtaacactaatctcttgtaacacataatagagtgaaaacatgcggtcacgattgcaggagtgatgcggttatcgtaacaccttaatatc

SEQ ID NO: 663 - DNA, 94 bp, Amaranthus rudis; identical to SEQ ID NO: 21

SEQ ID NO: 664 - DNA, 94 bp, Amaranthus rudis
tcgtctaatcgcatattttcattattttaatttttttataatttttagacgtgtataaatcaatatataaatgattaaaataacgtattggatt

SEQ ID NO: 665 - DNA, 200 bp, Amaranthus rudis
accaccatcaccattaaaacccctcaaaaatcctctttcttcaacttgataatttaatttaatactcatacctgtttttataacccgtaaatccagtgtaaagctttgttaaattcaagcaaaattgccaatacactatgaaactctcgaagataactgtgtaaaacgaaacccagaggtgaaacaccggaagacaccaa

SEQ ID NO: 666 - DNA, 200 bp, Amaranthus rudis
ttggtgtcttccggtgtttcacctctgggtttcgttttacacagttatcttcgagagtttcatagtgtattggcaattttgcttgaatttaacaaagctttacactggatttacgggttataaaaacaggtatgagtattaaattaaattatcaagttgaagaaagaggatttttgaggggttttaatggtgatggtggt

SEQ ID NO: 667 - DNA, 200 bp, Amaranthus rudis
gaggtgaaacaccggaagacaccaactttttcagccaagcaaacaaagcaaattcaaaaaagagaaagaataatggctcaagctactaccatcaacaatggtgtccaaactggtcaattgcaccatattttacccaaaacccacttacccaaatcttcaaaaactcttaattttggatcaaacttgagaatttctccaaa

SEQ ID NO: 668 - DNA, 200 bp, Amaranthus rudis
tttggagaaattctcaagtttgatccaaaattaagagtttttgaagatttgggtaagtgggttttgggtaaaatatggtgcaattgaccagtttggacaccattgttgatggtagtagcttgagccattattctttctcttttttgaatttgctttgtttgcttggctgaaaaagttggtgtcttccggtgtttcacctc

SEQ ID NO: 669 - DNA, 200 bp, Amaranthus rudis
gatcaaacttgagaatttctccaaagttcatgtctttgaccaataaaagagttggtgggcaatcatcaattgttcccaagattcaagcttctgttgctgctgcagctgagaagccttcatctgtcccagaaattgttttacaacccatcaaagagatctctggtactgttcaattgcctgggtcaaagtctttatccaat

SEQ ID NO: 670 - DNA, 200 bp, Amaranthus rudis
attggataaagactttgacccaggcaattgaacagtaccagagatctctttgatgggttgtaaaacaatttctgggacagatgaaggcttctcagctgcagcagcaacagaagcttgaatcttgggaacaattgatgattgcccaccaactcttttattggtcaaagacatgaactttggagaaattctcaagtttgatc

SEQ ID NO: 671 - DNA, 200 bp, Amaranthus rudis
gcctgggtcaaagtctttatccaatcgaatccttcttttagctgctttgtctgagggcacaacagtggtcgacaacttgctgtatagtgatgatattctttatatgttggacgctctcagaactcttggtttaaaagtggaggatgataatacagccaaaagggcagtcgtggagggttgtggtggtctgtttcctgttg

SEQ ID NO: 672 - DNA, 200 bp, Amaranthus rudis
caacaggaaacagaccaccacaaccctccacgactgcccttttggctgtattatcatcctccacttttaaaccaagagttctgagagcgtccaacatataaagaatatcatcactatacagcaagttgtcgaccactgttgtgccctcagacaaagcagctaaaagaaggattcgattggataaagactttgacccaggc

SEQ ID NO: 673 - DNA, 200 bp, Amaranthus rudis
ggttgtggtggtctgtttcctgttggtaaagatggaaaggaagagattcaacttttccttggtaatgcaggaacagcgatgcgcccattgacagctgcggttgccgttgctggaggaaattctagttatgtgcttgatggagtgccaagaatgagggagcgccccattggggatctggtagcaggtctaaagcaacttgg

SEQ ID NO: 674 - DNA, 200 bp, Amaranthus rudis
ccaagttgctttagacctgctaccagatccccaatggggcgctccctcattcttggcactccatcaagcacataactagaatttcctccagcaacggcaaccgcagctgtcaatgggcgcatcgctgttcctgcattaccaaggaaaagttgaatctcttcctttccatctttaccaacaggaaacagaccaccacaacc

SEQ ID NO: 675 - DNA, 200 bp, Amaranthus rudis
tggtagcaggtctaaagcaacttggttcagatgttgactgttttcttggcacaaattgccctcctgttcgggttaatgctaaaggaggccttccagggggcaaggtcaagctctctggatcggttagtagccaatatttaactgcacttctcatggctactcctttgggtcttggagacgtggagattgagatagttgat

SEQ ID NO: 676 - DNA, 200 bp, Amaranthus rudis
atcaactatctcaatctccacgtctccaagacccaaaggagtagccatgagaagtgcagttaaatattggctactaaccgatccagagagcttgaccttgccccctggaaggcctcctttagcattaacccgaacaggagggcaatttgtgccaagaaaacagtcaacatctgaaccaagttgctttagacctgctacca

SEQ ID NO: 677 - DNA, 200 bp, Amaranthus rudis
agacgtggagattgagatagttgataaattgatttctgtaccgtatgttgaaatgacaataaggttgatggaacgctttggagtatctgtagaacatagtgatagttgggacaggttctacatacgaggtggtcaaaaatacaaatctcctggaaaggcatatgttgagggtgacgcttcaagtgctagctacttcctag

SEQ ID NO: 678 - DNA, 200 bp, Amaranthus rudis
ctaggaagtagctagcacttgaagcgtcaccctcaacatatgcctttccaggagatttgtatttttgaccacctcgtatgtagaacctgtcccaactatcactatgttctacagatactccaaagcgttccatcaaccttattgtcatttcaacatacggtacagaaatcaatttatcaactatctcaatctccacgtct

SEQ ID NO: 679 - DNA, 200 bp, Amaranthus rudis
gcttcaagtgctagctacttcctagctggagccgccgtcactggtgggactgtgactgtcaagggttgtggaacaagcagtttacagggtgatgtaaaatttgccgaagttcttgagaagatgggctgcaaggtcacctggacagagaatagcgtaactgttacgggaccacccagggattcatctggaaggaaacatct

SEQ ID NO: 680 - DNA, 200 bp, Amaranthus rudis
agatgtttccttccagatgaatccctgggtggtcccgtaacagttacgctattctctgtccaggtgaccttgcagcccatcttctcaagaacttcggcaaattttacatcaccctgtaaactgcttgttccacaacccttgacagtcacagtcccaccagtgacggcggctccagctaggaagtagctagcacttgaagc

SEQ ID NO: 681 - DNA, 200 bp, Amaranthus rudis
gggattcatctggaaggaaacatctgcgcgctgtcgacgtcaacatgaacaaaatgccagatgttgctatgactcttgcagtagttgccttgtatgctgatgggcccactgccatcagagatgtggctagctggagagtgaaggaaaccgaacggatgattgccatttgcacagaactgagaaagcttggggcaacagtt

SEQ ID NO: 682 - DNA, 200 bp, Amaranthus rudis
aactgttgccccaagctttctcagttctgtgcaaatggcaatcatccgttcggtttccttcactctccagctagccacatctctgatggcagtgggcccatcagcatacaaggcaactactgcaagagtcatagcaacatctggcattttgttcatgttgacgtcgacagcgcgcagatgtttccttccagatgaatccc

SEQ ID NO: 683 - DNA, 200 bp, Amaranthus rudis
actgagaaagcttggggcaacagttgaggaaggatctgattactgtgtgatcactccgcctgaaaagctaaatcccaccgccatcgaaacttatgacgatcaccgaatggccatggcattctctcttgctgcctgtgcagatgttcccgtcactatccttgatccgggatgcacccgtaaaaccttcccggactactttg

SEQ ID NO: 684 - DNA, 200 bp, Amaranthus rudis
caaagtagtccgggaaggttttacgggtgcatcccggatcaaggatagtgacgggaacatctgcacaggcagcaagagagaatgccatggccattcggtgatcgtcataagtttcgatggcggtgggatttagcttttcaggcggagtgatcacacagtaatcagatccttcctcaactgttgccccaagctttctcagt

SEQ ID NO: 685 - DNA, 200 bp, Amaranthus rudis
cgtaaaaccttcccggactactttgaagttttagaaaagttcgccaagcattgagtaacatatgggttctttaaattgtacgccaaaggttttgatttgagactaatagtagataaaaggctataaactggctttatgcttgagtaattatgaaattctttgtattatgtttgtaagattttaagtagcttataaattac

SEQ ID NO: 686 - DNA, 200 bp, Amaranthus rudis
gtaatttataagctacttaaaatcttacaaacataatacaaagaatttcataattactcaagcataaagccagtttatagccttttatctactattagtctcaaatcaaaacctttggcgtacaatttaaagaacccatatgttactcaatgcttggcgaacttttctaaaacttcaaagtagtccgggaaggttttacg

SEQ ID NO: 687 - DNA, 40 bp, Amaranthus rudis; identical to SEQ ID NO: 22

SEQ ID NO: 688 - DNA, 40 bp, Amaranthus rudis
atatattgcggctaatgtgtaagacaaaatatagtcaagt

SEQ ID NO: 689 - DNA, 200 bp, Amaranthus rudis
atggctcaagctactgccatcaacaatggtgtccaaactggtcaattgcaccatactttacccaaaacccacttacccaaatcttcaaaaattgttaattttggatcaaacttgagaatttctccaaagttcatgtctttaaccattaaaagagttggtgggcaatcatcaattattcccaagattcaagcttcagttgc

SEQ ID NO: 690 - DNA, 200 bp, Amaranthus rudis
gcaactgaagcttgaatcttgggaataattgatgattgcccaccaactcttttaatggttaaagacatgaactttggagaaattctcaagtttgatccaaaattaacaatttttgaagatttgggtaagtgggttttgggtaaagtatggtgcaattgaccagtttggacaccattgttgatggcagtagcttgagccat

SEQ ID NO: 691 - DNA, 200 bp, Amaranthus rudis
ttcccaagattcaagcttcagttgctgctgcagctgagaagccttcatctgtcccagaaattgtgttacaacccatcaaagagatctctggtaccattcaattgcctgggtcaaagtctctatctaatcgaatccttcttttagctgctttgtctgagggcacaacagtggtcgacaacttgctgtatagtgatgatatt

SEQ ID NO: 692 - DNA, 200 bp, Amaranthus rudis
aatatcatcactatacagcaagttgtcgaccactgttgtgccctcagacaaagcagctaaaagaaggattcgattagatagagactttgacccaggcaattgaatggtaccagagatctctttgatgggttgtaacacaatttctgggacagatgaaggcttctcagctgcagcagcaactgaagcttgaatcttgggaa

SEQ ID NO: 693 - DNA, 200 bp, Amaranthus rudis
caacttgctgtatagtgatgatattctttatatgttggacgctctcagaactcttggtttaaaagtggatgatgataatacagacaaaagggcagtcgtggagggttgtggtggtctgtttcctgttggtaaagatggaaaggaagagattcaacttttccttggaaatgcaggaacagcgatgcgcccattgacagctg

SEQ ID NO: 694 - DNA, 200 bp, Amaranthus rudis
cagctgtcaatgggcgcatcgctgttcctgcatttccaaggaaaagttgaatctcttcctttccatctttaccaacaggaaacagaccaccacaaccctccacgactgcccttttgtctgtattatcatcatccacttttaaaccaagagttctgagagcgtccaacatataaagaatatcatcactatacagcaagttg

SEQ ID NO: 695 - DNA, 200 bp, Amaranthus rudis
acagcgatgcgcccattgacagctgcggttgccgttgctggaggaaattcaagctatgttcttgacggagtaccaagaatgagggagcgccccattggggatctggtagcaggtctaaagcaacttggttcagatgttgactgttttcttggcacaaattgccctcctgttcgggtcaatgctaaaggaggccttccagg

SEQ ID NO: 696 - DNA, 200 bp, Amaranthus rudis
cctggaaggcctcctttagcattgacccgaacaggagggcaatttgtgccaagaaaacagtcaacatctgaaccaagttgctttagacctgctaccagatccccaatggggcgctccctcattcttggtactccgtcaagaacatagcttgaatttcctccagcaacggcaaccgcagctgtcaatgggcgcatcgctgt

SEQ ID NO: 697 - DNA, 200 bp, Amaranthus rudis
tcaatgctaaaggaggccttccagggggcaaggtcaagctctctggatcggttagtagccaatatttaactgcacttctgatggctactcctttgggtcttggagatgtggagattgagatagttgataaattgatttccgtaccgtatgttgaaatgacaataaggttgatggaacgctttggagtatctgttgaacat

SEQ ID NO: 698 - DNA, 200 bp, Amaranthus rudis
atgttcaacagatactccaaagcgttccatcaaccttattgtcatttcaacatacggtacggaaatcaatttatcaactatctcaatctccacatctccaagacccaaaggagtagccatcagaagtgcagttaaatattggctactaaccgatccagagagcttgaccttgccccctggaaggcctcctttagcattga

SEQ ID NO: 699 - DNA, 200 bp, Amaranthus rudis
acgctttggagtatctgttgaacatagtgatagttgggacaggttcttcatccgaggtggtcagaaatacaaatctcctggaaaggcatatgttgagggtgacgcttcaagtgctagctacttcctagctggagctgccgtcactggggggactgtgactgtcaagggttgtggaacaagcagtttacagggtgatgtaa

SEQ ID NO: 700 - DNA, 200 bp, Amaranthus rudis
ttacatcaccctgtaaactgcttgttccacaacccttgacagtcacagtccccccagtgacggcagctccagctaggaagtagctagcacttgaagcgtcaccctcaacatatgcctttccaggagatttgtatttctgaccacctcggatgaagaacctgtcccaactatcactatgttcaacagatactccaaagcgt

SEQ ID NO: 701 - DNA, 200 bp, Amaranthus rudis
acaagcagtttacagggtgatgtaaaatttgccgaagttcttgagaagatgggttgcaaggtcacctggacagacaatagcgtaactgttactggaccacccagggaatcatctggaaggaaacatttgcgcgctatcgacgtcaacatgaataaaatgccagatgttgctatgactcttgcagttgttgccttgtatgc

SEQ ID NO: 702 - DNA, 200 bp, Amaranthus rudis
gcatacaaggcaacaactgcaagagtcatagcaacatctggcattttattcatgttgacgtcgatagcgcgcaaatgtttccttccagatgattccctgggtggtccagtaacagttacgctattgtctgtccaggtgaccttgcaacccatcttctcaagaacttcggcaaattttacatcaccctgtaaactgcttgt

SEQ ID NO: 703 - DNA, 200 bp, Amaranthus rudis
ctcttgcagttgttgccttgtatgcagatgggcccaccgccatcagagatgtggctagctggagagtgaaggaaaccgaacggatgattgccatttgcacagaactgagaaagcttggggcaacagttgaggaaggatctgattactgtgtgatcactccgcctgaaaagctgatacccaccgccatcgaaacttatgac

SEQ ID NO: 704 - DNA, 200 bp, Amaranthus rudis
gtcataagtttcgatggcggtgggtatcagcttttcaggcggagtgatcacacagtaatcagatccttcctcaactgttgccccaagctttctcagttctgtgcaaatggcaatcatccgttcggtttccttcactctccagctagccacatctctgatggcggtgggcccatctgcatacaaggcaacaactgcaagag

SEQ ID NO: 705 - DNA, 200 bp, Amaranthus rudis
ctctaatattatcgtttcctttttgtaacctgtttgcaggtcaagctctctggatcggttagtagccaatatttaactgcacttctgatggctactcctttgggtcttggagatgtggagattgagatagttgataaattgatttccgtaccgtatgttgaaatgacaataaggttgatggaacgctttggagtatctgt

SEQ ID NO: 706 - DNA, 200 bp, Amaranthus rudis
acagatactccaaagcgttccatcaaccttattgtcatttcaacatacggtacggaaatcaatttatcaactatctcaatctccacatctccaagacccaaaggagtagccatcagaagtgcagttaaatattggctactaaccgatccagagagcttgacctgcaaacaggttacaaaaaggaaacgataatattagag

SEQ ID NO: 707 - DNA, 200 bp, Amaranthus rudis
tgatggaacgctttggagtatctgttgaacatagtgatagttgggacaggttcttcatccgaggtggtcagaaatacaagtaagtctctcatcttatattacatgtccttttaacgtgtctccattagtagactgaaaacgcatgtaaatgcatcagatctcctggaaaggcatatgttgagggtgacgcttcaagtgct

SEQ ID NO: 708 - DNA, 200 bp, Amaranthus rudis
agcacttgaagcgtcaccctcaacatatgcctttccaggagatctgatgcatttacatgcgttttcagtctactaatggagacacgttaaaaggacatgtaatataagatgagagacttacttgtatttctgaccacctcggatgaagaacctgtcccaactatcactatgttcaacagatactccaaagcgttccatca

SEQ ID NO: 709 - DNA, 200 bp, Amaranthus rudis
ctgtttatttgaattttttgtttgagaaaaggcttacaggcttgcatatgtatatatgtatatttatgtatttgctttgtggtcaaatgtgctgcatgttgtaatgaaaactctgcccggggatggcaggcttacatgccaaagaaaaagattgtgttccaaaacagaaaatatcccatcggcatcagcctgcaattttt

SEQ ID NO: 710 - DNA, 200 bp, Amaranthus rudis
aaaaattgcaggctgatgccgatgggatattttctgttttggaacacaatctttttctttggcatgtaagcctgccatccccgggcagagttttcattacaacatgcagcacatttgaccacaaagcaaatacataaatatacatatatacatatgcaagcctgtaagccttttctcaaacaaaaaattcaaataaacag

SEQ ID NO: 711 - DNA, 200 bp, Amaranthus rudis
ccatcggcatcagcctgcaatttttttgggaatggtattaaatcttggaaatcttctcaatttgttcaaaccatgaggatttttccgtaatccaataattagcgcgttgtttcatttgtaaaaattacaatttttaatcatatttctctttagtgaagcaactgattggaaaactttggtatctgtcatgtttctttcca

SEQ ID NO: 712 - DNA, 200 bp, Amaranthus rudis
tggaaagaaacatgacagataccaaagttttccaatcagttgcttcactaaagagaaatatgattaaaaattgtaatttttacaaatgaaacaacgcgctaattattggattacggaaaaatcctcatggtttgaacaaattgagaagatttccaagatttaataccattcccaaaaaaattgcaggctgatgccgatgg

SEQ ID NO: 713 - DNA, 200 bp, Amaranthus rudis
ttggtatctgtcatgtttctttccaagttaaagtgttcccatgcatcatcttcaaaaatctttcataatgtttttgtacaatattttcgataggaagttcattcatgccaagggttaacaatatgtcacttgtgaatttctaaaatagcagaaaacatattgtgacctgtagagttcatcccaaggtatcctctgtgcga

SEQ ID NO: 714 - DNA, 200 bp, Amaranthus rudis
tcgcacagaggataccttgggatgaactctacaggtcacaatatgttttctgctattttagaaattcacaagtgacatattgttaacccttggcatgaatgaacttcctatcgaaaatattgtacaaaaacattatgaaagatttttgaagatgatgcatgggaacactttaacttggaaagaaacatgacagataccaa

SEQ ID NO: 715 - DNA, 200 bp, Amaranthus rudis
tcatcccaaggtatcctctgtgcgagggatgaaaaaagcctctggtaatttatgctactatcccaagatagtattattagaagtcatttatagccgcgtaagagagccaaggatcattgtaggcttgttctatttccatatcttaatgtagcacccaagtattcctcagcaatatgagtattttaaagtctttcaagtca

SEQ ID NO: 716 - DNA, 200 bp, Amaranthus rudis
tgacttgaaagactttaaaatactcatattgctgaggaatacttgggtgctacattaagatatggaaatagaacaagcctacaatgatccttggctctcttacgcggctataaatgacttctaataatactatcttgggatagtagcataaattaccagaggcttttttcatccctcgcacagaggataccttgggatga

SEQ ID NO: 717 - DNA, 200 bp, Amaranthus rudis
gagtattttaaagtctttcaagtcatacattatctcttggcaatgagtcgtttctggattttgaatgctgccagtccactaacttactgtaatgcaatacgtcattattcagctagtttcttattggaaaaaaaccataaaaatgggaaaagtttgaggtatatttctgtaatccaacttgaggattagctttatcacat

SEQ ID NO: 718 - DNA, 200 bp, Amaranthus rudis
atgtgataaagctaatcctcaagttggattacagaaatatacctcaaacttttcccatttttatggtttttttccaataagaaactagctgaataatgacgtattgcattacagtaagttagtggactggcagcattcaaaatccagaaacgactcattgccaagagataatgtatgacttgaaagactttaaaatactc

SEQ ID NO: 719 - DNA, 200 bp, Amaranthus rudis
aacttgaggattagctttatcacataaaagctacattgcaagatctattattagtttgaatttgcatcttaagtcttgtttttccttagtgattttttctttaacttgttattcgtttcctgaagtttccagtgtcataactcctaaccacaatcatgctacagggcacaacagtggtcgacaacttgctgtatagtgat

SEQ ID NO: 720 - DNA, 200 bp, Amaranthus rudis
atcactatacagcaagttgtcgaccactgttgtgccctgtagcatgattgtggttaggagttatgacactggaaacttcaggaaacgaataacaagttaaagaaaaaatcactaaggaaaaacaagacttaagatgcaaattcaaactaataatagatcttgcaatgtagcttttatgtgataaagctaatcctcaagtt

SEQ ID NO: 721 - DNA, 200 bp, Amaranthus rudis
ggtcgacaacttgctgtatagtgatgatattctttatatgttggacgctctcagaactcttggtttaaaagtggatgatgataatacagacaaaagggcagtcgtggagggttgtggtggtctgtttcctgttggtaaagatggaaaggaagagattcaacttttccttggaaatgcaggaacagcgatgcgcccattga

SEQ ID NO: 722 - DNA, 200 bp, Amaranthus rudis
tcaatgggcgcatcgctgttcctgcatttccaaggaaaagttgaatctcttcctttccatctttaccaacaggaaacagaccaccacaaccctccacgactgcccttttgtctgtattatcatcatccacttttaaaccaagagttctgagagcgtccaacatataaagaatatcatcactatacagcaagttgtcgacc

SEQ ID NO: 723 - DNA, 200 bp, Amaranthus rudis
gcaggaacagcgatgcgcccattgacagctgcggttgccgttgctggaggaaattcaaggtttgtccaattatatattttatgcgagtgtgatttttgtaatattactttttttgtgttagtttcaatcatgaagctgcttatgcagaagccgtacccctgaaattttcttattttgtatatatcagttggtaattgatg

SEQ ID NO: 724 - DNA, 200 bp, Amaranthus rudis
catcaattaccaactgatatatacaaaataagaaaatttcaggggtacggcttctgcataagcagcttcatgattgaaactaacacaaaaaaagtaatattacaaaaatcacactcgcataaaatatataattggacaaaccttgaatttcctccagcaacggcaaccgcagctgtcaatgggcgcatcgctgttcctgc

SEQ ID NO: 725 - DNA, 200 bp, Amaranthus rudis
ctttggtttggtaagaacttagccctcttctttctctcctctctctctctcagaaggctaaaatccacctaactttttcagccaagaaacaaagcgaaattcagaggtaaagagaaagaataatggctcaagctactaccatcaacaatggtgtccaaactggtcaattgcaccatactttacccaaaacccacttaccc

SEQ ID NO: 726 - DNA, 200 bp, Amaranthus rudis
gggtaagtgggttttgggtaaagtatggtgcaattgaccagtttggacaccattgttgatggtagtagcttgagccattattctttctctttacctctgaatttcgctttgtttcttggctgaaaaagttaggtggattttagccttctgagagagagagaggagagaaagaagagggctaagttcttaccaaaccaaag

SEQ ID NO: 727 - DNA, 200 bp, Amaranthus rudis
tactttacccaaaacccacttacccaaatcttcaaaaactgttaattttggatcaaactttagaatttctccaaagttcatgtctttaaccaataaaagagttggtgggcaatcatcaattattcccaagattcaagcttcagttgctgctgcagctgagaaaccttcatctgtcccagaaattgtgttacaacccatca

SEQ ID NO: 728 - DNA, 200 bp, Amaranthus rudis
tgatgggttgtaacacaatttctgggacagatgaaggtttctcagctgcagcagcaactgaagcttgaatcttgggaataattgatgattgcccaccaactcttttattggttaaagacatgaactttggagaaattctaaagtttgatccaaaattaacagtttttgaagatttgggtaagtgggttttgggtaaagta

SEQ ID NO: 729 - DNA, 200 bp, Amaranthus rudis
ccagaaattgtgttacaacccatcaaagagatctctggtaccattcaattgcctgggtcaaagtctctatctaatcgaatccttcttttagctgctttgtctcagggcacaactgtggtcgacaacttgctgtatagtgatgatattctttatatgttggacgctctcagaactcttggtttaaaagtggaggatgataa

SEQ ID NO: 730 - DNA, 200 bp, Amaranthus rudis
ttatcatcctccacttttaaaccaagagttctgagagcgtccaacatataaagaatatcatcactatacagcaagttgtcgaccacagttgtgccctgagacaaagcagctaaaagaaggattcgattagatagagactttgacccaggcaattgaatggtaccagagatctctttgatgggttgtaacacaatttctgg

SEQ ID NO: 731 - DNA, 200 bp, Amaranthus rudis
ttggtttaaaagtggaggatgataatacagacaaaagggcagtcgtggagggttgtggtggtctgtttcctgttggtaaagatggaaaggaagagattcaacttttccttggaaatgcaggaacagcgatgcgcccattgacagctgcggttgccgttgctggaggaaattcaagctatgttcttgacggagtaccaaga

SEQ ID NO: 732 - DNA, 200 bp, Amaranthus rudis
tcttggtactccgtcaagaacatagcttgaatttcctccagcaacggcaaccgcagctgtcaatgggcgcatcgctgttcctgcatttccaaggaaaagttgaatctcttcctttccatctttaccaacaggaaacagaccaccacaaccctccacgactgcccttttgtctgtattatcatcctccacttttaaaccaa

SEQ ID NO: 733 - DNA, 200 bp, Amaranthus rudis
ctatgttcttgacggagtaccaagaatgagggagcgccccattggggatctggtagcaggtctaaagcaacttggttcagatgttgactgttttcttggcacaaattgccctcctgttcgggtcaatgctaaaggaggccttccagggggcaaggtcaagctctctggatcggttagtagccaatatttaactgcacttc

SEQ ID NO: 734 - DNA, 200 bp, Amaranthus rudis
gaagtgcagttaaatattggctactaaccgatccagagagcttgaccttgccccctggaaggcctcctttagcattgacccgaacaggagggcaatttgtgccaagaaaacagtcaacatctgaaccaagttgctttagacctgctaccagatccccaatggggcgctccctcattcttggtactccgtcaagaacatag

SEQ ID NO: 735 - DNA, 200 bp, Amaranthus rudis
agtagccaatatttaactgcacttctgatggctactcctttgggtcttggagatgtggagattgagatagttgataaattgatttccgtaccgtatgttgaaatgacaataaggttgatggaacgctttggagtatctgttgaacatagtgatagttgggacaggttcttcatccgaggtggtcagaaatacaaatctcc

SEQ ID NO: 736 - DNA, 200 bp, Amaranthus rudis
ggagatttgtatttctgaccacctcggatgaagaacctgtcccaactatcactatgttcaacagatactccaaagcgttccatcaaccttattgtcatttcaacatacggtacggaaatcaatttatcaactatctcaatctccacatctccaagacccaaaggagtagccatcagaagtgcagttaaatattggctact

SEQ ID NO: 737 - DNA, 200 bp, Amaranthus rudis
gaggtggtcagaaatacaaatctcctggaaaggcatatgttgagggtgacgcttcaagtgctagctacttcctagctggagccgccgtcactggggggactgtgactgtcaagggttgtggaacaagcagtttacagggtgatgtaaaatttgccgaagttcttgagaagatgggttgcaaggtcacctggacagacaat

SEQ ID NO: 738 - DNA, 200 bp, Amaranthus rudis
attgtctgtccaggtgaccttgcaacccatcttctcaagaacttcggcaaattttacatcaccctgtaaactgcttgttccacaacccttgacagtcacagtccccccagtgacggcggctccagctaggaagtagctagcacttgaagcgtcaccctcaacatatgcctttccaggagatttgtatttctgaccacctc

SEQ ID NO: 739 - DNA, 200 bp, Amaranthus rudis
ttgcaaggtcacctggacagacaatagcgtaactgttactggaccacccagggaatcatctggaaggaaacatttgcgcgctatcgacgtcaacatgaataaaatgccagatgttgctatgactcttgcagttgttgccttgtatgcagatgggcccaccgccattagagatgtggctagctggagagtgaaggaaaccg

SEQ ID NO: 740 - DNA, 200 bp, Amaranthus rudis
cggtttccttcactctccagctagccacatctctaatggcggtgggcccatctgcatacaaggcaacaactgcaagagtcatagcaacatctggcattttattcatgttgacgtcgatagcgcgcaaatgtttccttccagatgattccctgggtggtccagtaacagttacgctattgtctgtccaggtgaccttgcaa

SEQ ID NO: 741 - DNA, 200 bp, Amaranthus rudis
gctagctggagagtgaaggaaaccgaacggatgattgccatttgcacagaactgagaaagcttggggcaacagttgaggaaggatctgattactgtgtgatcactccgcctgaaaagctgatacccaccgccatcgaaacttatgacgatcaccgaatggccatggcattctctcttgctgcctgtgctgatgttcccgt

SEQ ID NO: 742 - DNA, 200 bp, Amaranthus rudis
acgggaacatcagcacaggcagcaagagagaatgccatggccattcggtgatcgtcataagtttcgatggcggtgggtatcagcttttcaggcggagtgatcacacagtaatcagatccttcctcaactgttgccccaagctttctcagttctgtgcaaatggcaatcatccgttcggtttccttcactctccagctagc

SEQ ID NO: 743 - DNA, 200 bp, Amaranthus rudis
ttgctgcctgtgctgatgttcccgtcactatccttgatccgggatgtacacgtaaaaccttcccggactactttgatgtcttagaaaagttcgccaagcattgagtagcctatacgagatctataaattgtacgccgaaggttttgatttgagactaatagtagataaaaggctattaaactggctttctgctcgagtaa

SEQ ID NO: 744 - DNA, 200 bp, Amaranthus rudis
ttactcgagcagaaagccagtttaatagccttttatctactattagtctcaaatcaaaaccttcggcgtacaatttatagatctcgtataggctactcaatgcttggcgaacttttctaagacatcaaagtagtccgggaaggttttacgtgtacatcccggatcaaggatagtgacgggaacatcagcacaggcagcaa

SEQ ID NO: 745 - DNA, 200 bp, Amaranthus rudis
ttaaactggctttctgctcgagtaattatgaaattctttgtattatgtttgtaagattttaagtagcttataaattacaatgtactaaagtctagaaataagttatgtatgggttatgaattatgatgctgaaatcaatgagaaatgcatacttgaaaggcgaaaaaaaaaagaaaaaaaaacaaaacatgtcggccgcc

SEQ ID NO: 746 - DNA, 200 bp, Amaranthus rudis
ggcggccgacatgttttgtttttttttcttttttttttcgcctttcaagtatgcatttctcattgatttcagcatcataattcataacccatacataacttatttctagactttagtacattgtaatttataagctacttaaaatcttacaaacataatacaaagaatttcataattactcgagcagaaagccagtttaa

SEQ ID NO: 747 - DNA, 200 bp, Amaranthus rudis
gaaacttatgacgatcaccgaatggccatggcattctctcttgctgcctgtgctgatgttcccgtcactatccttgatccgggatgtacacgtaaaaccttcccggactactttgatgtcttagaaaagttcgccaagcattgagtagcctatacgagatctataaattgtacgccgaaggttttgatttgagactaata

SEQ ID NO: 748 - DNA, 200 bp, Amaranthus rudis
tattagtctcaaatcaaaaccttcggcgtacaatttatagatctcgtataggctactcaatgcttggcgaacttttctaagacatcaaagtagtccgggaaggttttacgtgtacatcccggatcaaggatagtgacgggaacatcagcacaggcagcaagagagaatgccatggccattcggtgatcgtcataagtttc

SEQ ID NO: 749 - DNA, 200 bp, Amaranthus rudis
cgaaggttttgatttgagactaatagtagataaaaggctattaaactggctttctgctcgagtaattatgaaattctttgtattatgtttgtaagattttaagtagcttataaattacaatgtactaaagtctagaaataagttatgtatgggttatgaattatgatgctgaaatcaatgagaaatgcatacttgaaagg

SEQ ID NO: 750 - DNA, 200 bp, Amaranthus rudis
cctttcaagtatgcatttctcattgatttcagcatcataattcataacccatacataacttatttctagactttagtacattgtaatttataagctacttaaaatcttacaaacataatacaaagaatttcataattactcgagcagaaagccagtttaatagccttttatctactattagtctcaaatcaaaaccttcg

SEQ ID NO: 751 - DNA, 200 bp, Amaranthus rudis
gacggtgtctcaggagactagctggcggagtttagcatcaaccgatattgggcattagactcgatcaagacttcataaccgagactccgattctcttcaaaccaatcatcttatttcaacccatgttagtttaagtcatcaaatatcaaccgaataagtttagctaataaaaagaaacggaagataatataatgcattat

SEQ ID NO: 752 - DNA, 200 bp, Amaranthus rudis
ataatgcattatattatcttccgtttctttttattagctaaacttattcggttgatatttgatgacttaaactaacatgggttgaaataagatgattggtttgaagagaatcggagtctcggttatgaagtcttgatcgagtctaatgcccaatatcggttgatgctaaactccgccagctagtctcctgagacaccgtc

SEQ ID NO: 753 - DNA, 200 bp, Amaranthus rudis
taagcttgaacgatgaatagtgtcagtaacgaaaatgtagcaactatttcagaacggaggaagtaatttgaaacaaagagaaaattattgttcttcaagaaaaaggtagataatagtaataaatgaaaagagagaatgaattgtatggttgaaattgagagagagttaaaatgtatggatgagatttaaaggaagtggtg

SEQ ID NO: 754 - DNA, 200 bp, Amaranthus rudis
caccacttcctttaaatctcatccatacattttaactctctctcaatttcaaccatacaattcattctctcttttcatttattactattatctacctttttcttgaagaacaataattttctctttgtttcaaattacttcctccgttctgaaatagttgctacattttcgttactgacactattcatcgttcaagctta

SEQ ID NO: 755 - DNA, 200 bp, Amaranthus rudis
tcaagtcagtggtcggtaatgaaacgaataataaatgctagagagagagaaagtatgtgtaccgtaaatggcattgagtgcgggtatttatagaacaataaatgacctggttggttgtcctaggggtattttagtaatttcacccgtaggtgggttgagtcaagacgttgactgggctgattgggccctttgacttagcc

SEQ ID NO: 756 - DNA, 200 bp, Amaranthus rudis
ggctaagtcaaagggcccaatcagcccagtcaacgtcttgactcaacccacctacgggtgaaattactaaaatacccctaggacaaccaaccaggtcatttattgttctataaatacccgcactcaatgccatttacggtacacatactttctctctctctagcatttattattcgtttcattaccgaccactgacttga

SEQ ID NO: 757 - DNA, 200 bp, Amaranthus rudis
gctgattgggccctttgacttagcccataaatttggggctagttgacccaattacaataatgatatttataatatataaagtccgtctctgttattttccaaacatcgaataaagtcagcatcgactctccataaaaaggatccatttcttttagtttgtctaattgggctcataaaatacaaggaacccctttatattt

SEQ ID NO: 758 - DNA, 200 bp, Amaranthus rudis
aaatataaaggggttccttgtattttatgagcccaattagacaaactaaaagaaatggatcctttttatggagagtcgatgctgactttattcgatgtttggaaaataacagagacggactttatatattataaatatcattattgtaattgggtcaactagccccaaatttatgggctaagtcaaagggcccaatcagc

SEQ ID NO: 759 - DNA, 200 bp, Amaranthus rudis
aaatacaaggaacccctttatatttagtaattgattgtgttaaagaaatgcacctcaagaaaatgtttaacttgatagtttgagtcctaatttattttagatatattttgcggctattctttacatacatgaatttgttacgataaagtgtggaggcaatatacatcctatttataaatgattaaaattaatctcggcca

SEQ ID NO: 760 - DNA, 200 bp, Amaranthus rudis
tggccgagattaattttaatcatttataaataggatgtatattgcctccacactttatcgtaacaaattcatgtatgtaaagaatagccgcaaaatatatctaaaataaattaggactcaaactatcaagttaaacattttcttgaggtgcatttctttaacacaatcaattactaaatataaaggggttccttgtattt

SEQ ID NO: 761 - DNA, 200 bp, Amaranthus rudis
tcatattgagttttggcgccaacatagacctaatcaaataatgaaaaatacaaacaacatcatatggtttcttttgtctttatgactagacactctttattattccttgattgggatcttattttgaatggttgtttagcctacacctcatgttcagattttgttcgtataccagacttttcttgattgcgatcttattt

SEQ ID NO: 762 - DNA, 200 bp, Amaranthus rudis
aaataagatcgcaatcaagaaaagtctggtatacgaacaaaatctgaacatgaggtgtaggctaaacaaccattcaaaataagatcccaatcaaggaataataaagagtgtctagtcataaagacaaaagaaaccatatgatgttgtttgtatttttcattatttgattaggtctatgttggcgccaaaactcaatatga

SEQ ID NO: 763 - DNA, 200 bp, Amaranthus rudis
acttttcttgattgcgatcttatttgtcccctggattttgcatagggtgatgtaaaatttgccgaagttcttgagaagatgggttgcacggtcacctggacagagaatagcgtaactgttactggaccacccagggaatcatctggaaggaaacatttgcgcgctatcgacgtcaacatgaataaaatgccagatgttgc

SEQ ID NO: 764 - DNA, 200 bp, Amaranthus rudis
gcaacatctggcattttattcatgttgacgtcgatagcgcgcaaatgtttccttccagatgattccctgggtggtccagtaacagttacgctattctctgtccaggtgaccgtgcaacccatcttctcaagaacttcggcaaattttacatcaccctatgcaaaatccaggggacaaataagatcgcaatcaagaaaagt

SEQ ID NO: 765 - DNA, 200 bp, Amaranthus rudis
tgatacaaagattgcaacatttgcaagaccttgctgttcggatttagagcgaaatctatttgccattaatttcgaatgggtcgaatttagccttatccttattcgtgataacaaagagattgctttgaagtccttacgtttgaaaatcctggacttcactgaattaatgtaattttccaggatttctgttacgtgccatg

SEQ ID NO: 766 - DNA, 200 bp, Amaranthus rudis
catggcacgtaacagaaatcctggaaaattacattaattcagtgaagtccaggattttcaaacgtaaggacttcaaagcaatctctttgttatcacgaataaggataaggctaaattcgacccattcgaaattaatggcaaatagatttcgctctaaatccgaacagcaaggtcttgcaaatgttgcaatctttgtatca

SEQ ID NO: 767 - DNA, 200 bp, Amaranthus rudis
tccaggatttctgttacgtgccatgaaatggaatactttattgattatgtgctagggataaataagcttaagaaggcaatttcccaggtcctattaatgctacctacacttcatattaacctttctgatatagtttttcttttctttgcatgtattgatttagctatgttcttgacggagtaccaagaatgagggagcgc

SEQ ID NO: 768 - DNA, 200 bp, Amaranthus rudis
gcgctccctcattcttggtactccgtcaagaacatagctaaatcaatacatgcaaagaaaagaaaaactatatcagaaaggttaatatgaagtgtaggtagcattaataggacctgggaaattgccttcttaagcttatttatccctagcacataatcaataaagtattccatttcatggcacgtaacagaaatcctgga

SEQ ID NO: 769 - DNA, 200 bp, Amaranthus rudis
cggagtaccaagaatgagggagcgccccattggggatctggtagcaggtctaaagcaacttggttcagatgttgactgttttcttggcacaaattgccctcctgttcgggtcaatgctaaaggaggccttccagggggcaaggtaatgtaattaaactttctttttgttttgttagattttgtgttttactcaatttctt

SEQ ID NO: 770 - DNA, 200 bp, Amaranthus rudis
aagaaattgagtaaaacacaaaatctaacaaaacaaaaagaaagtttaattacattaccttgccccctggaaggcctcctttagcattgacccgaacaggagggcaatttgtgccaagaaaacagtcaacatctgaaccaagttgctttagacctgctaccagatccccaatggggcgctccctcattcttggtactccg

SEQ ID NO: 771 - DNA, 200 bp, Amaranthus rudis
gattttgtgttttactcaatttcttggtagtacttctttccctacctaactccgacttctcagattgaccttttttaagaggtggggaatagtgtttcttaagtgaggaaaagagaaagccggggtatgagctttagcatgacatcgtatgtatttgatattgatactgcaaatcaagtgggaatcaagcataaaatagc

SEQ ID NO: 772 - DNA, 200 bp, Amaranthus rudis
gctattttatgcttgattcccacttgatttgcagtatcaatatcaaatacatacgatgtcatgctaaagctcataccccggctttctcttttcctcacttaagaaacactattccccacctcttaaaaaaggtcaatctgagaagtcggagttaggtagggaaagaagtactaccaagaaattgagtaaaacacaaaatc

SEQ ID NO: 773 - DNA, 200 bp, Amaranthus rudis
aagtgggaatcaagcataaaatagcttcagagggatacattttcttttcttgcatgaagttatacagcataaatgatcagaggtgtctgctgtgtatatgtgtaataagactgttatagttagcaggaatgcaggagataaattatgaagatggtgttgatgaatcttaaaagacaattcagaaaccaaagtttgagtag

SEQ ID NO: 774 - DNA, 200 bp, Amaranthus rudis
ctactcaaactttggtttctgaattgtcttttaagattcatcaacaccatcttcataatttatctcctgcattcctgctaactataacagtcttattacacatatacacagcagacacctctgatcatttatgctgtataacttcatgcaagaaaagaaaatgtatccctctgaagctattttatgcttgattcccactt

SEQ ID NO: 775 - DNA, 200 bp, Amaranthus rudis
aattcagaaaccaaagtttgagtagtaagtgacttttgagaggtgtacttctctcccaaatgagctataagctctaacaaaagtctcaatactaatcagatgcctctctcacgctccatccctttatttagatttcttgatttcttttttataactttcccaacttattccccgcttttccttcacgctaccttctaact

SEQ ID NO: 776 - DNA, 200 bp, Amaranthus rudis
agttagaaggtagcgtgaaggaaaagcggggaataagttgggaaagttataaaaaagaaatcaagaaatctaaataaagggatggagcgtgagagaggcatctgattagtattgagacttttgttagagcttatagctcatttgggagagaagtacacctctcaaaagtcacttactactcaaactttggtttctgaatt

SEQ ID NO: 777 - DNA, 200 bp, Amaranthus rudis
ttttccttcacgctaccttctaactgaaataaaatgcaattcttacctggtttctttatggcttgttaattttaataaggatcaagtatagtatgaaagtaattctctttggcattaaggcttttgcattgttgtttgtctaagatcccaatggcaagttcacataagatatctgttggtatatgtataaaataattagt

SEQ ID NO: 778 - DNA, 200 bp, Amaranthus rudis
actaattattttatacatataccaacagatatcttatgtgaacttgccattgggatcttagacaaacaacaatgcaaaagccttaatgccaaagagaattactttcatactatacttgatccttattaaaattaacaagccataaagaaaccaggtaagaattgcattttatttcagttagaaggtagcgtgaaggaaaa

SEQ ID NO: 779 - DNA, 200 bp, Amaranthus rudis
ttggtatatgtataaaataattagtcagttgaacaattttctttttcttggcaaataaactcgtatgatacttcaccgggggagggggggagggggttagatttggtacggtaagtatcctgtgtattatttttcttcagttattttatttagttgcttttttggggttacttttttctccatctaggatcctgtatgtt

SEQ ID NO: 780 - DNA, 200 bp, Amaranthus rudis
aacatacaggatcctagatggagaaaaaagtaaccccaaaaaagcaactaaataaaataactgaagaaaaataatacacaggatacttaccgtaccaaatctaaccccctccccccctcccccggtgaagtatcatacgagtttatttgccaagaaaaagaaaattgttcaactgactaattattttatacatataccaa

SEQ ID NO: 781 - DNA, 200 bp, Amaranthus rudis
ttctccatctaggatcctgtatgttaatgtttcttcacttattttatttagttgcttttttggggttacattttttttcgaggggctactgagttcataagataagggtcttgtgtattaatatgctcttcacttggtgctcgctattggtgtaactgtaattcaggtgtcttcttcactcttaagataaggatgatttt

SEQ ID NO: 782 - DNA, 200 bp, Amaranthus rudis
aaaatcatccttatcttaagagtgaagaagacacctgaattacagttacaccaatagcgagcaccaagtgaagagcatattaatacacaagacccttatcttatgaactcagtagcccctcgaaaaaaaatgtaaccccaaaaaagcaactaaataaaataagtgaagaaacattaacatacaggatcctagatggagaa

SEQ ID NO: 783 - DNA, 200 bp, Amaranthus rudis
tcactcttaagataaggatgattttatgagaaatgtttccacatgcttggcaccaacttgtttatgtgtagtagtagaagaaattatgtataacatgcatactcagcatggcagtgactagtgaataagaattgaagaaaggaggtaaagttgcatgcaagaaacctataaaaagatgattcattcaaaaccttttgcta

SEQ ID NO: 784 - DNA, 200 bp, Amaranthus rudis
tagcaaaaggttttgaatgaatcatctttttataggtttcttgcatgcaactttacctcctttcttcaattcttattcactagtcactgccatgctgagtatgcatgttatacataatttcttctactactacacataaacaagttggtgccaagcatgtggaaacatttctcataaaatcatccttatcttaagagtga

SEQ ID NO: 785 - DNA, 200 bp, Amaranthus rudis
atgattcattcaaaaccttttgctatagccatgcttacaaattgatcaaattagaacttcaatttcaaagtttgttgttaatgagaagttaagcatagttgtgattttcaatttcacagtcatgaagtaagaaactctctaatattatcgtttcctttttgtaacctgtttgcaggtcaagctctctggatcggttagta

SEQ ID NO: 786 - DNA, 200 bp, Amaranthus rudis
tactaaccgatccagagagcttgacctgcaaacaggttacaaaaaggaaacgataatattagagagtttcttacttcatgactgtgaaattgaaaatcacaactatgcttaacttctcattaacaacaaactttgaaattgaagttctaatttgatcaatttgtaagcatggctatagcaaaaggttttgaatgaatcat

SEQ ID NO: 787 - DNA, 200 bp, Amaranthus rudis
gtcaagctctctggatcggttagtagccaatatttaactgcacttctgatggctactcctttgggtcttggagatgtggagattgagatagttgataaattgatttccgtaccgtatgttgaaatgacaataaggttgatggaacgctttggagtatctgttgaacatagtgatagttgggacaggttcttcatccgagg

SEQ ID NO: 788 - DNA, 200 bp, Amaranthus rudis
cctcggatgaagaacctgtcccaactatcactatgttcaacagatactccaaagcgttccatcaaccttattgtcatttcaacatacggtacggaaatcaatttatcaactatctcaatctccacatctccaagacccaaaggagtagccatcagaagtgcagttaaatattggctactaaccgatccagagagcttgac

SEQ ID NO: 789 - DNA, 200 bp, Amaranthus rudis
gttgggacaggttcttcatccgaggtggtcagaaatacaagtaagtctctcatcttacattacatgtccttttaacgtgtctccattagtagactgaaaacgcatgtaaatgcatcagatctcctggaaaggcatatgttgagggtgacgcttcaagtgctagctacttcctagctggagctgccgtcactggggggact

SEQ ID NO: 790 - DNA, 200 bp, Amaranthus rudis
agtccccccagtgacggcagctccagctaggaagtagctagcacttgaagcgtcaccctcaacatatgcctttccaggagatctgatgcatttacatgcgttttcagtctactaatggagacacgttaaaaggacatgtaatgtaagatgagagacttacttgtatttctgaccacctcggatgaagaacctgtcccaac

SEQ ID NO: 791 - DNA, 200 bp, Amaranthus rudis
tgtgtaaaaaacgaaaacccagagaggtgaaacaccggaagacacctaactttttcagctaagcacacaaagcgaaattcagagataaagagaaacaataatggctcaagctactgccatcaacaatggtgtccaaactggtcaattgcaccatactttacccaaaacccacttacccaaatcttcaaaaattgttaatt

SEQ ID NO: 792 - DNA, 200 bp, Amaranthus rudis
aattaacaatttttgaagatttgggtaagtgggttttgggtaaagtatggtgcaattgaccagtttggacaccattgttgatggcagtagcttgagccattattgtttctctttatctctgaatttcgctttgtgtgcttagctgaaaaagttaggtgtcttccggtgtttcacctctctgggttttcgttttttacaca

SEQ ID NO: 793 - DNA, 200 bp, Amaranthus rudis
cccaaatcttcaaaaattgttaattttggatcaaacttgagaatttctccaaagttcatgtctttaaccattaaaagagttggtgggcaatcatcaattattcccaagattcaagcttcagttgctgctgcagctgagaagccttcatctgtcccagaaattgtgttacaacccatcaaagagatctctggtaccattca

SEQ ID NO: 794 - DNA, 200 bp, Amaranthus rudis
tgaatggtaccagagatctctttgatgggttgtaacacaatttctgggacagatgaaggcttctcagctgcagcagcaactgaagcttgaatcttgggaataattgatgattgcccaccaactcttttaatggttaaagacatgaactttggagaaattctcaagtttgatccaaaattaacaatttttgaagatttggg

SEQ ID NO: 795 - DNA, 200 bp, Amaranthus rudis
tcaaagagatctctggtaccattcaattgcctgggtcaaagtctctatctaatcgaatccttcttttagctgctttgtctgaggtatttatttctcaactactaaaactttccaatctctatttgatattggaatttatattatagctgctttggaatttataaaaacaggtatgagtattaaattaaattatcaagttg

SEQ ID NO: 796 - DNA, 200 bp, Amaranthus rudis
caacttgataatttaatttaatactcatacctgtttttataaattccaaagcagctataatataaattccaatatcaaatagagattggaaagttttagtagttgagaaataaatacctcagacaaagcagctaaaagaaggattcgattagatagagactttgacccaggcaattgaatggtaccagagatctctttga

SEQ ID NO: 797 - DNA, 200 bp, Amaranthus rudis
ttatcacgcctcctttgctatcgaagaaatatatataaaaaaaagaattatttcacctgtaagcgtaccccaaatatcgacgcaaaatgcatgtcacatatgtgtaatgattttttgtgtgaataaacagtggctagctggagagtgaaggaaaccgaacggatgattgccatttgcacagaactgagaaaggttagcag

SEQ ID NO: 798 - DNA, 200 bp, Amaranthus rudis
ctgctaacctttctcagttctgtgcaaatggcaatcatccgttcggtttccttcactctccagctagccactgtttattcacacaaaaaatcattacacatatgtgacatgcattttgcgtcgatatttggggtacgcttacaggtgaaataattcttttttttatatatatttcttcgatagcaaaggaggcgtgataa

SEQ ID NO: 799 - DNA, 200 bp, Amaranthus rudis
ttctcattaccaccgtttattacaatctaccaaacgggccgttaaggttttcttaactaggggtgtttagtttggaggaaagctttttattggaaaactgttttctccatattcctataatgacttgactggatttagattggaaaattagggttgaaaacaatttttccttccattataagcttataattttatagtta

SEQ ID NO: 800 - DNA, 200 bp, Amaranthus rudis
taactataaaattataagcttataatggaaggaaaaattgttttcaaccctaattttccaatctaaatccagtcaagtcattataggaatatggagaaaacagttttccaataaaaagctttcctccaaactaaacacccctagttaagaaaaccttaacggcccgtttggtagattgtaataaacggtggtaatgagaa

SEQ ID NO: 801 - DNA, 200 bp, Amaranthus rudis
ttataagcttataattttatagttagatgaaaatcaaatttcattcactttcactccatctcccttgttagcattatcgttttccattaaacaaaacaaaagaaaagtactaatcattaacgtttacctggaaaattatttctaatggtaatgttctccgtcagaccaaacaccttcggaatgaggaagcattatggatt

SEQ ID NO: 802 - DNA, 200 bp, Amaranthus rudis
aatccataatgcttcctcattccgaaggtgtttggtctgacggagaacattaccattagaaataattttccaggtaaacgttaatgattagtacttttcttttgttttgtttaatggaaaacgataatgctaacaagggagatggagtgaaagtgaatgaaatttgattttcatctaactataaaattataagcttataa

SEQ ID NO: 803 - DNA, 200 bp, Amaranthus rudis
tcggaatgaggaagcattatggattaaagaaccttgtgcttggattattttatttgtctataagatgcttgtctagagtgtgcttgtatgtttattaacttatcacgcctcctttgctatcgaagaaatatatataaaaaaaagaattatttcacctgtaagcgtaccccaaatatcgacgcaaaatgcatgtcacatat

SEQ ID NO: 804 - DNA, 200 bp, Amaranthus rudis
atatgtgacatgcattttgcgtcgatatttggggtacgcttacaggtgaaataattcttttttttatatatatttcttcgatagcaaaggaggcgtgataagttaataaacatacaagcacactctagacaagcatcttatagacaaataaaataatccaagcacaaggttctttaatccataatgcttcctcattccga

SEQ ID NO: 805 - DNA, 200 bp, Amaranthus rudis
tcgacgcaaaatgcatgtcacatatgtgtaatgaatatgttatgtgaataaacagtggctagctggagagtgaaggaaaccgaacggatgattgccatttgcacagaactgagaaaggttagcagtcttttacattcttgaaggttgtaaatagttcttgagtaaaatatattcaatgtataactgatgttcatttgcat

SEQ ID NO: 806 - DNA, 200 bp, Amaranthus rudis
atgcaaatgaacatcagttatacattgaatatattttactcaagaactatttacaaccttcaagaatgtaaaagactgctaacctttctcagttctgtgcaaatggcaatcatccgttcggtttccttcactctccagctagccactgtttattcacataacatattcattacacatatgtgacatgcattttgcgtcga

SEQ ID NO: 807 - DNA, 200 bp, Amaranthus rudis
atgtataactgatgttcatttgcattcctatcaatacttccagcttggggcaacagttgaggaaggatctgattactgtgtgatcactccgcctgaaaagctgatacccaccgccatcgaaacttatgacgatcaccgaatggccatggcattctctcttgctgcctgtgctgatgttcccgtcactatccttgatccgg

SEQ ID NO: 808 - DNA, 200 bp, Amaranthus rudis
ccggatcaaggatagtgacgggaacatcagcacaggcagcaagagagaatgccatggccattcggtgatcgtcataagtttcgatggcggtgggtatcagcttttcaggcggagtgatcacacagtaatcagatccttcctcaactgttgccccaagctggaagtattgataggaatgcaaatgaacatcagttatacat

SEQ ID NO: 809 - DNA, 200 bp, Amaranthus rudis
gttcccgtcactatccttgatccgggatgtacacgtaaaaccttcccggactactttgatgtcttagaaaagttcgccaagcattgagtagcctatacgagatctataaattgtacgccgaaggttttgatttgagactaatagtagataaaaggctattaaactggctttctgctcgagtaattatgaaattctttgta

SEQ ID NO: 810 - DNA, 200 bp, Amaranthus rudis
tacaaagaatttcataattactcgagcagaaagccagtttaatagccttttatctactattagtctcaaatcaaaaccttcggcgtacaatttatagatctcgtataggctactcaatgcttggcgaacttttctaagacatcaaagtagtccgggaaggttttacgtgtacatcccggatcaaggatagtgacgggaac

SEQ ID NO: 811 - DNA, 200 bp, Amaranthus spinosus
catcaacctagaatgcccatattttacatgtttagcattaaccctagaacatgaaacataatgtgggtgttgaaatgctaaatacaataaagtatcaaattgtttagcaggattatcatcacctaaattatcagaactctctaaagggtaccctaaagcttgtttaacctcaaataaataatcatcaatccaaattttat

SEQ ID NO: 812 - DNA, 200 bp, Amaranthus spinosus
ataaaatttggattgatgattatttatttgaggttaaacaagctttagggtaccctttagagagttctgataatttaggtgatgataatcctgctaaacaatttgatactttattgtatttagcatttcaacacccacattatgtttcatgttctagggttaatgctaaacatgtaaaatatgggcattctaggttgatg

SEQ ID NO: 813 - DNA, 200 bp, Amaranthus spinosus
aaataatcatcaatccaaattttatcattttgattaagctttgaagagggtaaacaagaacttaataatgggaattgtttaagggacatttgaggactatttaagaatctttgagctagttttgcatcatctaatggtggtttaaggatgtattttctagggggtgctttttctttggggatattactttttctttcagc

SEQ ID NO: 814 - DNA, 200 bp, Amaranthus spinosus
gctgaaagaaaaagtaatatccccaaagaaaaagcaccccctagaaaatacatccttaaaccaccattagatgatgcaaaactagctcaaagattcttaaatagtcctcaaatgtcccttaaacaattcccattattaagttcttgtttaccctcttcaaagcttaatcaaaatgataaaatttggattgatgattattt

SEQ ID NO: 815 - DNA, 200 bp, Amaranthus spinosus
tggggatattactttttctttcagctagttcttttaggagtctttgagggctagtttttgggagttcttgagggtctatggatgaaacagcaagaatttggtgataatggaaagtgggctggagttttttgatgggaatttggagggaaaatgatgggaaggatgaagtaaaggaaacatcagtggtttttgagatgggt

SEQ ID NO: 816 - DNA, 200 bp, Amaranthus spinosus
acccatctcaaaaaccactgatgtttcctttacttcatccttcccatcattttccctccaaattcccatcaaaaaactccagcccactttccattatcaccaaattcttgctgtttcatccatagaccctcaagaactcccaaaaactagccctcaaagactcctaaaagaactagctgaaagaaaaagtaatatcccca

SEQ ID NO: 817 - DNA, 200 bp, Amaranthus spinosus
aacatcagtggtttttgagatgggtttaaaaggggatgagaggtccattgtaagaagagaaatgagaggaaaaagatggagttttgaggattgttatgggagctttaatggcggattggacgggacgccattgaagttgatggagagtgagaaaatggagggttttagagggttctagtgaagaattgtggaattgggaa

SEQ ID NO: 818 - DNA, 200 bp, Amaranthus spinosus
ttcccaattccacaattcttcactagaaccctctaaaaccctccattttctcactctccatcaacttcaatggcgtcccgtccaatccgccattaaagctcccataacaatcctcaaaactccatctttttcctctcatttctcttcttacaatggacctctcatccccttttaaacccatctcaaaaaccactgatgtt

SEQ ID NO: 819 - DNA, 200 bp, Amaranthus spinosus
tagtgaagaattgtggaattgggaattgaggataaggttgatggaacgctttggagtatccgtagaacatagtgatagttgggacaggttctacatccgaggtggtcagaaatacaaatctcctggaaaggcatatgtagagggggacgcttctagtgctagctacttcctagcaggagccgccgtcactggtgggactg

SEQ ID NO: 820 - DNA, 200 bp, Amaranthus spinosus
cagtcccaccagtgacggcggctcctgctaggaagtagctagcactagaagcgtccccctctacatatgcctttccaggagatttgtatttctgaccacctcggatgtagaacctgtcccaactatcactatgttctacggatactccaaagcgttccatcaaccttatcctcaattcccaattccacaattcttcacta

SEQ ID NO: 821 - DNA, 200 bp, Amaranthus spinosus
tcctgttcgggtcaatgctaaaggaggccttccagggggcaaggtcaagctctctggatcggttagtagccaatatttaactgcacttctcatggctactcctttggggtcttggagacgtggagattgagatagttgataaattgatttctgtaccgtatgttgaaatgacaataaggttgatggaacgctttggagta

SEQ ID NO: 822 - DNA, 200 bp, Amaranthus spinosus
tactccaaagcgttccatcaaccttattgtcatttcaacatacggtacagaaatcaatttatcaactatctcaatctccacgtctccaagaccccaaaggagtagccatgagaagtgcagttaaatattggctactaaccgatccagagagcttgaccttgccccctggaaggcctcctttagcattgacccgaacagga

SEQ ID NO: 823 - DNA, 200 bp, Amaranthus spinosus
aaggttgatggaacgctttggagtatccgtagaacatagtgatagttgggacaggttctacatccgaggtggtcagaaatacaaatctcctggaaaggcatatgtagagggggacgcttctagtgctagctacttcctagcaggagccgccgtcactggtgggactgtgactgtcaagggttgtggaacaagcagtttac

SEQ ID NO: 824 - DNA, 200 bp, Amaranthus spinosus
gtaaactgcttgttccacaacccttgacagtcacagtcccaccagtgacggcggctcctgctaggaagtagctagcactagaagcgtccccctctacatatgcctttccaggagatttgtatttctgaccacctcggatgtagaacctgtcccaactatcactatgttctacggatactccaaagcgttccatcaacctt

SEQ ID NO: 825 - DNA, 200 bp, Amaranthus thunbergii
cacccaactttttcagccaacaaacaacgccaaattcagagaaagaataatggctcaagctactaccatcaacaatggtgtccaaactggtcaattgcaccatattttacccaaaacccacttacccaaatcttcaaaaactcttaattttggatcaaacttgagaatttctccaaagttcatgtctttgaccaataaaa

SEQ ID NO: 826 - DNA, 200 bp, Amaranthus thunbergii
ttttattggtcaaagacatgaactttggagaaattctcaagtttgatccaaaattaagagtttttgaagatttgggtaagtgggttttgggtaaaatatggtgcaattgaccagtttggacaccattgttgatggtagtagcttgagccattattctttctctgaatttggcgttgtttgttggctgaaaaagttgggtg

SEQ ID NO: 827 - DNA, 200 bp, Amaranthus thunbergii
aagttcatgtctttgaccaataaaagagttggtgggcaatcatcaattgttcccaagattcaagcttctgttgctgctgcagctgagaagccttcatctgtcccagaaattgttttacaacccatcaaagagatctctggtactgttcaattgcctgggtcaaagtctttatccaatcgaatccttcttttagctgcttt

SEQ ID NO: 828 - DNA, 200 bp, Amaranthus thunbergii
aaagcagctaaaagaaggattcgattggataaagactttgacccaggcaattgaacagtaccagagatctctttgatgggttgtaaaacaatttctgggacagatgaaggcttctcagctgcagcagcaacagaagcttgaatcttgggaacaattgatgattgcccaccaactcttttattggtcaaagacatgaactt

SEQ ID NO: 829 - DNA, 200 bp, Amaranthus thunbergii
cagcgatgcgcccattgacagctgcggttgccgttgctggaggaaattctagttatgtgcttgatggagtgccaagaatgagggagcgccccattggggatctggtagcaggtctaaagcaacttggttcagatgttgactgttttcttggcacaaattgccctcctgttcgggttaatgctaaaggaggccttccaggg

SEQ ID NO: 830 - DNA, 200 bp, Amaranthus thunbergii
ccctggaaggcctcctttagcattaacccgaacaggagggcaatttgtgccaagaaaacagtcaacatctgaaccaagttgctttagacctgctaccagatccccaatggggcgctccctcattcttggcactccatcaagcacataactagaatttcctccagcaacggcaaccgcagctgtcaatgggcgcatcgctg

SEQ ID NO: 831 - DNA, 200 bp, Amaranthus thunbergii
taatgctaaaggaggccttccagggggcaaggtcaagctctctggatcggttagtagccaatatttaactgcacttctcatggctactcctttgggtcttggagacgtggagattgagatagttgataaattgatttctgtaccgtatgttgaaatgacaataaggttgatggaacgctttggagtatctgtagaacata

SEQ ID NO: 832 - DNA, 200 bp, Amaranthus thunbergii
tatgttctacagatactccaaagcgttccatcaaccttattgtcatttcaacatacggtacagaaatcaatttatcaactatctcaatctccacgtctccaagacccaaaggagtagccatgagaagtgcagttaaatattggctactaaccgatccagagagcttgaccttgccccctggaaggcctcctttagcatta

SEQ ID NO: 833 - DNA, 200 bp, Amaranthus thunbergii
cgctttggagtatctgtagaacatagtgatagttgggacaggttctacatacgaggtggtcaaaaatacaaatctcctggaaaggcatatgttgagggtgacgcttcaagtgctagctacttcctagctggagccgccgtcactggtgggactgtgactgtcaagggttgtggaacaagcagtttacagggtgatgtaaa

SEQ ID NO: 834 - DNA, 200 bp, Amaranthus thunbergii
tttacatcaccctgtaaactgcttgttccacaacccttgacagtcacagtcccaccagtgacggcggctccagctaggaagtagctagcacttgaagcgtcaccctcaacatatgcctttccaggagatttgtatttttgaccacctcgtatgtagaacctgtcccaactatcactatgttctacagatactccaaagcg

SEQ ID NO: 835 - DNA, 200 bp, Amaranthus thunbergii
caagcagtttacagggtgatgtaaaatttgccgaagttcttgagaagatgggctgcaaggtcacctggacagagaatagcgtaactgttacgggaccacccagggattcatctggaaggaaacatctgcgcgctgtcgacgtcaacatgaacaaaatgccagatgttgctatgactcttgcagtagttgccttgtatgct

SEQ ID NO: 836 - DNA, 200 bp, Amaranthus thunbergii
agcatacaaggcaactactgcaagagtcatagcaacatctggcattttgttcatgttgacgtcgacagcgcgcagatgtttccttccagatgaatccctgggtggtcccgtaacagttacgctattctctgtccaggtgaccttgcagcccatcttctcaagaacttcggcaaattttacatcaccctgtaaactgcttg

SEQ ID NO: 837 - DNA, 200 bp, Amaranthus thunbergii
tcttgcagtagttgccttgtatgctgatgggcccactgccatcagagatgtggctagctggagagtgaaggaaaccgaacggatgattgccatttgcacagaactgagaaagcttggggcaacagttgaggaaggatctgattactgtgtgatcactccgcctgaaaagctaaatcccaccgccatcgaaacttatgacg

SEQ ID NO: 838 - DNA, 200 bp, Amaranthus thunbergii
cgtcataagtttcgatggcggtgggatttagcttttcaggcggagtgatcacacagtaatcagatccttcctcaactgttgccccaagctttctcagttctgtgcaaatggcaatcatccgttcggtttccttcactctccagctagccacatctctgatggcagtgggcccatcagcatacaaggcaactactgcaaga

SEQ ID NO: 839 - DNA, 200 bp, Amaranthus viridis
acccgaactttttcagccaacaaacaacgctaaattcagagaaagaataatggctcaagctactaccatcaacaatggtgtccaaactggtcaattgcaccatattttacccaaaacccacttacccaaatcttcaaaaactcttaattttggatcaaacttgagaatttctccaaagttcatgtctttgaccaataaaa

SEQ ID NO: 840 - DNA, 200 bp, Amaranthus viridis
ttttattggtcaaagacatgaactttggagaaattctcaagtttgatccaaaattaagagtttttgaagatttgggtaagtgggttttgggtaaaatatggtgcaattgaccagtttggacaccattgttgatggtagtagcttgagccattattctttctctgaatttagcgttgtttgttggctgaaaaagttcgggt

SEQ ID NO: 841 - DNA, 200 bp, Amaranthus viridis; identical to SEQ ID NO: 827

SEQ ID NO: 842 - DNA, 200 bp, Amaranthus viridis; identical to SEQ ID NO: 828

SEQ ID NO: 843 - DNA, 200 bp, Amaranthus viridis
atcgaatccttcttttagctgctttgtctgagggcacaacagtggtcgacaacttgctgtatagtgatgatattctttatatgttggacgctctcagaactcttggtttaaaagtggaggatgataatacagccaaaagggcagtcgtggagggttgtggtggtctgtttcctgttggtaaagatggaaaggaagagatt

SEQ ID NO: 844 - DNA, 200 bp, Amaranthus viridis
aatctcttcctttccatctttaccaacaggaaacagaccaccacaaccctccacgactgcccttttggctgtattatcatcctccacttttaaaccaagagttctgagagcgtccaacatataaagaatatcatcactatacagcaagttgtcgaccactgttgtgccctcagacaaagcagctaaaagaaggattcgat

SEQ ID NO: 845 - DNA, 200 bp, Amaranthus viridis
tggtaaagatggaaaggaagagattcaacttttccttggtaatgcaggaacagcgatgcgcccattgacagctgcggttgccgttgctggaggaaattctagttatgtgcttgatggagtgccaagaatgagggagcgccccattggggatctggtagcaggtctaaagcaacttggttcagatgttgactgttttcttg

SEQ ID NO: 846 - DNA, 200 bp, Amaranthus viridis
caagaaaacagtcaacatctgaaccaagttgctttagacctgctaccagatccccaatggggcgctccctcattcttggcactccatcaagcacataactagaatttcctccagcaacggcaaccgcagctgtcaatgggcgcatcgctgttcctgcattaccaaggaaaagttgaatctcttcctttccatctttacca

SEQ ID NO: 847 - DNA, 200 bp, Amaranthus viridis
ggttcagatgttgactgttttcttggcacaaattgccctcctgttcgggttaatgctaaaggaggccttccagggggcaaggtcaagctctctggatcggttagtagccaatatttaactgcacttctcatggctactcctttgggtcttggagacgtggagattgagatagttgataaattgatttctgtaccgtatgt

SEQ ID NO: 848 - DNA, 200 bp, Amaranthus viridis
acatacggtacagaaatcaatttatcaactatctcaatctccacgtctccaagacccaaaggagtagccatgagaagtgcagttaaatattggctactaaccgatccagagagcttgaccttgccccctggaaggcctcctttagcattaacccgaacaggagggcaatttgtgccaagaaaacagtcaacatctgaacc

SEQ ID NO: 849 - DNA, 200 bp, Amaranthus viridis
ataaattgatttctgtaccgtatgttgaaatgacaataaggttgatggaacgctttggagtatctgtagaacatagtgatagttgggacaggttctacatacgaggtggtcaaaaatacaaatctcctggaaaggcatatgttgagggtgacgcttcaagtgctagctacttcctagctggagccgccgtcactggtggg

SEQ ID NO: 850 - DNA, 200 bp, Amaranthus viridis
cccaccagtgacggcggctccagctaggaagtagctagcacttgaagcgtcaccctcaacatatgcctttccaggagatttgtatttttgaccacctcgtatgtagaacctgtcccaactatcactatgttctacagatactccaaagcgttccatcaaccttattgtcatttcaacatacggtacagaaatcaatttat

SEQ ID NO: 851 - DNA, 200 bp, Amaranthus viridis
agctggagccgccgtcactggtgggactgtgactgtcaagggttgtggaacaagcagtttacagggtgatgtaaaatttgccgaagttcttgagaagatgggctgcaaggtcacctggacagagaatagcgtaactgttacgggaccacccagggattcatctggaaggaaacatctgcgcgctgtcgacgtcaacatga

SEQ ID NO: 852 - DNA, 200 bp, Amaranthus viridis
tcatgttgacgtcgacagcgcgcagatgtttccttccagatgaatccctgggtggtcccgtaacagttacgctattctctgtccaggtgaccttgcagcccatcttctcaagaacttcggcaaattttacatcaccctgtaaactgcttgttccacaacccttgacagtcacagtcccaccagtgacggcggctccagct

SEQ ID NO: 853 - DNA, 200 bp, Amaranthus viridis
ctgcgcgctgtcgacgtcaacatgaacaaaatgccagatgttgctatgactcttgcagtagttgccttgtatgctgatgggcccactgccatcagagatgtggctagctggagagtgaaggaaaccgaacggatgattgccatttgcacagaactgagaaagcttggggcaacagttgaggaaggatctgattactgtgt

SEQ ID NO: 854 - DNA, 200 bp, Amaranthus viridis
acacagtaatcagatccttcctcaactgttgccccaagctttctcagttctgtgcaaatggcaatcatccgttcggtttccttcactctccagctagccacatctctgatggcagtgggcccatcagcatacaaggcaactactgcaagagtcatagcaacatctggcattttgttcatgttgacgtcgacagcgcgcag

SEQ ID NO: 855 - DNA, 200 bp, Amaranthus viridis
ttgaggaaggatctgattactgtgtgatcactccgcctgaaaagctaaatcccaccgccatcgaaacttatgatgatcaccgaatggccatggcattctctcttgctgcctgtgcagatgttcccgtcactatccttgatccgggatgcacccgtaaaaccttcccggactactttgaagttttagaaaagttcgccaag

SEQ ID NO: 856 - DNA, 200 bp, Amaranthus viridis
cttggcgaacttttctaaaacttcaaagtagtccgggaaggttttacgggtgcatcccggatcaaggatagtgacgggaacatctgcacaggcagcaagagagaatgccatggccattcggtgatcatcataagtttcgatggcggtgggatttagcttttcaggcggagtgatcacacagtaatcagatccttcctcaa

SEQ ID NO: 857 - DNA, 200 bp, Amaranthus viridis
cccaggagcatccaaatgtttcattaatagcctctcggccatcacaagatcctggatcttttggccaagatactccagtcgctcaaaacagaacctaggatgttcaaacttgtatttcgatggatgtaggaaacatagctggagcccaagtccaagctcgatattccttgcttcagtgatctctggaagtcgatcattct

SEQ ID NO: 858 - DNA, 200 bp, Amaranthus viridis
agaatgatcgacttccagagatcactgaagcaaggaatatcgagcttggacttgggctccagctatgtttcctacatccatcgaaatacaagtttgaacatcctaggttctgttttgagcgactggagtatcttggccaaaagatccaggatcttgtgatggccgagaggctattaatgaaacatttggatgctcctggg

SEQ ID NO: 859 - DNA, 200 bp, Amaranthus viridis
gtgatctctggaagtcgatcattctttggcaaaggataacccaatattttcataacttgtggtctgcaatcaaaatcccaaatgtttcctctgaaccgatgcatgcctggaggcacacaagctctaaaaaccctcggatgagcaaaaagagcatcctcgggaggcctataggtagctacatcttgccaattgagttttct

SEQ ID NO: 860 - DNA, 200 bp, Amaranthus viridis
agaaaactcaattggcaagatgtagctacctataggcctcccgaggatgctctttttgctcatccgagggtttttagagcttgtgtgcctccaggcatgcatcggttcagaggaaacatttgggattttgattgcagaccacaagttatgaaaatattgggttatcctttgccaaagaatgatcgacttccagagatcac

SEQ ID NO: 861 - DNA, 200 bp, Amaranthus viridis
ctacatcttgccaattgagttttctgccttcaaattccacagaaacataatcaacatcttcgagctgccttcttttctttggttggcattcttcatcttctggatccatcccaaacacttcaaatagtacacgataaacttccggcatcccataacacaagtatatagcaccaaacaaagcccagaaaacagactttgaa

SEQ ID NO: 862 - DNA, 200 bp, Amaranthus viridis
ttcaaagtctgttttctgggctttgtttggtgctatatacttgtgttatgggatgccggaagtttatcgtgtactatttgaagtgtttgggatggatccagaagatgaagaatgccaaccaaagaaaagaaggcagctcgaagatgttgattatgtttctgtggaatttgaaggcagaaaactcaattggcaagatgtag

SEQ ID NO: 863 - DNA, 200 bp, Amaranthus viridis
caaagcccagaaaacagactttgaagcaggctctttctcagggcgcctcaatttatcaatatcatcaaaaggaaacaccaaattatgcagactagcagctttaatccacttaggtaaaaacctcttccctatcaaagcaaacactctttccctcattggtcctggagactcccttggatatctctgcaagaaaaactccg

SEQ ID NO: 864 - DNA, 200 bp, Amaranthus viridis
cggagtttttcttgcagagatatccaagggagtctccaggaccaatgagggaaagagtgtttgctttgatagggaagaggtttttacctaagtggattaaagctgctagtctgcataatttggtgtttccttttgatgatattgataaattgaggcgccctgagaaagagcctgcttcaaagtctgttttctgggctttg

SEQ ID NO: 865 - DNA, 200 bp, Amaranthus viridis
ggatatctctgcaagaaaaactccgcaaaccctaattcgagcacgaattgacccaaaaacatcaacctagaatgcccatattttacatgtttagcattaaccctagaacatgaaacataatgtgggtgttgaaatgctaaatacaataaagtatcaaattgtttagcaggattatcatcacctaaattatcagaactctc

SEQ ID NO: 866 - DNA, 200 bp, Amaranthus viridis
gagagttctgataatttaggtgatgataatcctgctaaacaatttgatactttattgtatttagcatttcaacacccacattatgtttcatgttctagggttaatgctaaacatgtaaaatatgggcattctaggttgatgtttttgggtcaattcgtgctcgaattagggtttgcggagtttttcttgcagagatatcc

SEQ ID NO: 867 - DNA, 200 bp, Amaranthus viridis
catcacctaaattatcagaactctctaaagggtaccctaaagcttgtttaacctcaaacaaataatcatcaatccaaattttatcattttgattaagctttgaagagggtaaacaagaactcaataatgggaattgtttaagggacatttgaggactatttaagaatctttgagctagttttgcgtcatctaatggtggt

SEQ ID NO: 868 - DNA, 200 bp, Amaranthus viridis
accaccattagatgacgcaaaactagctcaaagattcttaaatagtcctcaaatgtcccttaaacaattcccattattgagttcttgtttaccctcttcaaagcttaatcaaaatgataaaatttggattgatgattatttgtttgaggttaaacaagctttagggtaccctttagagagttctgataatttaggtgatg

SEQ ID NO: 869 - DNA, 200 bp, Amaranthus viridis
tagttttgcgtcatctaatggtggtttaaggatatattttctagggggtgcttttttctttggggatattattttttcctttcagctagttcttttaggagtctttgagggctagttttagggagttcttgagggtctatggatgaaacagctagaatttggtgataatggaaagtgggttggagttttttgatgggaat

SEQ ID NO: 870 - DNA, 200 bp, Amaranthus viridis
attcccatcaaaaaactccaacccactttccattatcaccaaattctagctgtttcatccatagaccctcaagaactccctaaaactagccctcaaagactcctaaaagaactagctgaaaggaaaaaataatatccccaaagaaaaaagcaccccctagaaaatatatccttaaaccaccattagatgacgcaaaacta

SEQ ID NO: 871 - DNA, 200 bp, Amaranthus viridis
tgggttggagttttttgatgggaatttggagagaaaatgatgggaaggatgaagtaaaggaaatatcagtggtttttgagatgggtttaaaaggggatgagaggtccattgtaagaagagaaatgagaggaaaaaaaatggagttttgaggattgttatgtgagctttaatggcggattggacgggacgccattgaagtt

SEQ ID NO: 872 - DNA, 200 bp, Amaranthus viridis
aacttcaatggcgtcccgtccaatccgccattaaagctcacataacaatcctcaaaactccattttttttcctctcatttctcttcttacaatggacctctcatccccttttaaacccatctcaaaaaccactgatatttcctttacttcatccttcccatcattttctctccaaattcccatcaaaaaactccaaccca

SEQ ID NO: 873 - DNA, 200 bp, Amaranthus viridis
gattggacgggacgccattgaagttgatggagagtgagaaaatggagggtttttagagggttcgagtgaagaattgtggaattgggaattaaggataaggtgatggaacgctttggagtatctgtagaacatagtgatagttgggacaggttctacatacgaggtggtcaaaaatacaaatctcctggaaaggcatatgt

SEQ ID NO: 874 - DNA, 200 bp, Amaranthus viridis
acatatgcctttccaggagatttgtatttttgaccacctcgtatgtagaacctgtcccaactatcactatgttctacagatactccaaagcgttccatcaccttatccttaattcccaattccacaattcttcactcgaaccctctaaaaaccctccattttctcactctccatcaacttcaatggcgtcccgtccaatc

SEQ ID NO: 875 - DNA, 200 bp, Amaranthus viridis
acaaatctcctggaaaggcatatgttgagggtgacgcttcaagtgctagctacttcctagctggagccgccgtcactggtgggactgtgactgtcaagggttgtggaacaagcagtttacagggtgatgtaaaatttgccgaagttcttgagaagatgggctgcaaggtcacctggacagagaatagcgtaactgttacg

SEQ ID NO: 876 - DNA, 200 bp, Amaranthus viridis
cgtaacagttacgctattctctgtccaggtgaccttgcagcccatcttctcaagaacttcggcaaattttacatcaccctgtaaactgcttgttccacaacccttgacagtcacagtcccaccagtgacggcggctccagctaggaagtagctagcacttgaagcgtcaccctcaacatatgcctttccaggagatttgt

SEQ ID NO: 877 - DNA, 200 bp, Amaranthus viridis
gacagagaatagcgtaactgttacgggaccacccagggattcatctggaaggaaacatctgcgcgctgtcgacgtcaacatgaacaaaatgccagatgttgctatgactcttgcagtagttgccttgtatgctgatgggcccactgccatcagagatgtggctagctggagagtgaaggaaaccgaacggatgattgcca

SEQ ID NO: 878 - DNA, 200 bp, Amaranthus viridis
tggcaatcatccgttcggtttccttcactctccagctagccacatctctgatggcagtgggcccatcagcatacaaggcaactactgcaagagtcatagcaacatctggcattttgttcatgttgacgtcgacagcgcgcagatgtttccttccagatgaatccctgggtggtcccgtaacagttacgctattctctgtc

SEQ ID NO: 879 - DNA, 200 bp, Amaranthus viridis
aaggaaaccgaacggatgattgccatttgcacagaactgagaaagcttggggcaacagttgaggaaggatctgattactgtgtgatcactccgcctgaaaagctaaatcccaccgccatcgaaacttatgatgatcaccgaatggccatggcattctctcttgctgcctgtgcagatgttcccgtcactatccttgatcc

SEQ ID NO: 880 - DNA, 200 bp, Amaranthus viridis
ggatcaaggatagtgacgggaacatctgcacaggcagcaagagagaatgccatggccattcggtgatcatcataagtttcgatggcggtgggatttagcttttcaggcggagtgatcacacagtaatcagatccttcctcaactgttgccccaagctttctcagttctgtgcaaatggcaatcatccgttcggtttcctt

SEQ ID NO: 881 - DNA, 200 bp, Amaranthus viridis
atgttcccgtcactatccttgatccgggatgcacccgtaaaaccttcccggactactttgaagttttagaaaagttcgccaagcattgagtaacatatgggttctttaaattgtacgccaaggttttgatttgagactaatagtagataaaaggctataattatgaaattctttgtattatgtttgtaagatttaagtag

SEQ ID NO: 882 - DNA, 200 bp, Amaranthus viridis
ctacttaaatcttacaaacataatacaaagaatttcataattatagccttttatctactattagtctcaaatcaaaaccttggcgtacaatttaaagaacccatatgttactcaatgcttggcgaacttttctaaaacttcaaagtagtccgggaaggttttacgggtgcatcccggatcaaggatagtgacgggaacat

SEQ ID NO: 883 - DNA, 200 bp, Ambrosia artemisiifolia
aatgaagggtgatgtgaaatttgcggaggttcttggacaaatgggggctgaagtaacatggaccgaaaactctgttacggtgaggggcccaccgagggatgcttctggaaggaaacatttgcgtgctgtagatgtcaacatgaacaaaatgcctgatgttgccatgactcttgccgtggttgctctatatgcagatggtc

SEQ ID NO: 884 - DNA, 200 bp, Ambrosia artemisiifolia
gaccatctgcatatagagcaaccacggcaagagtcatggcaacatcaggcattttgttcatgttgacatctacagcacgcaaatgtttccttccagaagcatccctcggtgggcccctcaccgtaacagagttttcggtccatgttacttcagcccccatttgtccaagaacctccgcaaatttcacatcacccttcatt

SEQ ID NO: 885 - DNA, 200 bp, Ambrosia artemisiifolia
ctatataatagtctgtttggactaaaagttgtaaatttaaaaatatttcaggtctcctggaaatgcttatgtcgaaggtgatgcttcaagtgctagttacttccttgctggtgcagcagtcactggtggcactatcactgtagaaggatgtggcacaagtagtttacaggtacattttaccaagaagttcatgtttgtta

SEQ ID NO: 886 - DNA, 200 bp, Ambrosia artemisiifolia
taacaaacatgaacttcttggtaaaatgtacctgtaaactacttgtgccacatccttctacagtgatagtgccaccagtgactgctgcaccagcaaggaagtaactagcacttgaagcatcaccttcgacataagcatttccaggagacctgaaatatttttaaatttacaacttttagtccaaacagactattatatag

SEQ ID NO: 887 - DNA, 200 bp, Ambrosia artemisiifolia
tttaccaagaagttcatgtttgttaagaagttcccaaccaatttaaacaatatctccagaacgagtgcatgtattttccttttgattacatacaagtcatgctgtttttctggtttttctttgggttaagggtgatgtaaaatttgctgaggttttggagaatatgggtgccaaagtcacttggactcagaacagtgtca

SEQ ID NO: 888 - DNA, 200 bp, Ambrosia artemisiifolia
tgacactgttctgagtccaagtgactttggcacccatattctccaaaacctcagcaaattttacatcacccttaacccaaagaaaaaccagaaaaacagcatgacttgtatgtaatcaaaaggaaaatacatgcactcgttctggagatattgtttaaattggttgggaacttcttaacaaacatgaacttcttggtaaa

SEQ ID NO: 889 - DNA, 200 bp, Ambrosia artemisiifolia
gtcacttggactcagaacagtgtcactgttactggaccgccaagaattccggaaggaaggaaacacttgcgtcccgtcgatgttaacatgaacaaaatgccagatgttgccatgactcttgctgttgttgccctttatgctggaactactgtggtagacaatttgttgaacagtgaggatgttcatcatatgcttgttgc

SEQ ID NO: 890 - DNA, 200 bp, Ambrosia artemisiifolia
gcaacaagcatatgatgaacatcctcactgttcaacaaattgtctaccacagtagttccagcataaagggcaacaacagcaagagtcatggcaacatctggcattttgttcatgttaacatcgacgggacgcaagtgtttccttccttccggaattcttggcggtccagtaacagtgacactgttctgagtccaagtgac

SEQ ID NO: 891 - DNA, 200 bp, Ambrosia artemisiifolia
aggatgttcatcatatgcttgttgctttgggaaaacttggattacatgtggaacatgacagtgaaaagaaacaagccattgtagaaggctgcgctggtcggtttccggtggggaaaggggaaggtcaagaaattgagcttttccttgggaatgctggaactgcaatgcgaccacttactgccgctgttactgctgccggt

SEQ ID NO: 892 - DNA, 200 bp, Ambrosia artemisiifolia
accggcagcagtaacagcggcagtaagtggtcgcattgcagttccagcattcccaaggaaaagctcaatttcttgaccttcccctttccccaccggaaaccgaccagcgcagccttctacaatggcttgtttcttttcactgtcatgttccacatgtaatccaagttttcccaaagcaacaagcatatgatgaacatcct

SEQ ID NO: 893 - DNA, 200 bp, Ambrosia artemisiifolia
tactgccgctgttactgctgccggtggcaattcaaggtctgttcaattttgatcatttttacaatgtaataatgcaaaaaagtgaccattaaatcaatttacaattcaacagttaaactgagatgtcagcttttcaataaattcttttagttttgtaaacaagtatgctgcattttccatggaaccatctgcttatatgc

SEQ ID NO: 894 - DNA, 200 bp, Ambrosia artemisiifolia
gcatataagcagatggttccatggaaaatgcagcatacttgtttacaaaactaaaagaatttattgaaaagctgacatctcagtttaactgttgaattgtaaattgatttaatggtcacttttttgcattattacattgtaaaaatgatcaaaattgaacagaccttgaattgccaccggcagcagtaacagcggcagta

SEQ ID NO: 895 - DNA, 200 bp, Ambrosia artemisiifolia
tccatggaaccatctgcttatatgctaatgcactttgttttatatataactatcatgtttttgagctaatgcatgttgttacttatattttagctacatacttgatggcatacctcgaatgagagagagacctattgaggacttggttactggtcttaagcagctcggtgcagacgttgattgcactcttggcacaaatt

SEQ ID NO: 896 - DNA, 200 bp, Ambrosia artemisiifolia
aatttgtgccaagagtgcaatcaacgtctgcaccgagctgcttaagaccagtaaccaagtcctcaataggtctctctctcattcgaggtatgccatcaagtatgtagctaaaatataagtaacaacatgcattagctcaaaaacatgatagttatatataaaacaaagtgcattagcatataagcagatggttccatgga

SEQ ID NO: 897 - DNA, 200 bp, Ambrosia artemisiifolia
gttgattgcactcttggcacaaattgtccccctgtttatataaatggaaagggtggtcttcctggggggaaaggtacgtctcatatcagttctgttatgcttttgtggtttcatattgttggatgaattgttttgtaaggtcgtcgtggaactgcttcagaaattgcttttctaaggtagatacaggaagccccataaga

SEQ ID NO: 898 - DNA, 200 bp, Ambrosia artemisiifolia
tcttatggggcttcctgtatctaccttagaaaagcaatttctgaagcagttccacgacgaccttacaaaacaattcatccaacaatatgaaaccacaaaagcataacagaactgatatgagacgtacctttccccccaggaagaccaccctttccatttatataaacagggggacaatttgtgccaagagtgcaatcaac

SEQ ID NO: 899 - DNA, 200 bp, Ambrosia artemisiifolia
gcgtccagtcgatgttaacatgaacaaaatgccagatgttgccatgactcttgcagtcgttgccctttatgccgacggtcccacagccattagggacggtatgattgagcattttacgtctttttaatatttttttctcccacaattggaatttaccacatatccttaaaatataaaaaaatagttgttttagattttat

SEQ ID NO: 900 - DNA, 200 bp, Ambrosia artemisiifolia
ataaaatctaaaacaactatttttttatattttaaggatatgtggtaaattccaattgtgggagaaaaaaatattaaaaagacgtaaaatgctcaatcataccgtccctaatggctgtgggaccgtcggcataaagggcaacgactgcaagagtcatggcaacatctggcattttgttcatgttaacatcgactggacgc

SEQ ID NO: 901 - DNA, 200 bp, Ambrosia artemisiifolia
aaaaaatagttgttttagattttatataagacaggtgcgcagcgatgatcacataaaccgacatgtatccatatataaaattgtagatgcaaagacttcccctcggctttgttaaataatagttcataatgacatcattttctcccggtatttggcagtggctagctggagagtaaaagaaaccgaaaggatgattgcca

SEQ ID NO: 902 - DNA, 200 bp, Ambrosia artemisiifolia
tggcaatcatcctttcggtttcttttactctccagctagccactgccaaataccgggagaaaatgatgtcattatgaactattatttaacaaagccgaggggaagtctttgcatctacaattttatatatggatacatgtcggtttatgtgatcatcgctgcgcacctgtcttatataaaatctaaaacaactatttttt

SEQ ID NO: 903 - DNA, 200 bp, Ambrosia artemisiifolia
aaagaaaccgaaaggatgattgccatttgcacagaactaagaaaggtacgagtcaatataaccatattactcttaaacagctttcaacccattattgtttaatgctaaaagacgtttttgcatttgtaaccttgttcagttgggagcaacagtcgaagaaggacccgattattgtgtgatcactccaccagagaagttga

SEQ ID NO: 904 - DNA, 200 bp, Ambrosia artemisiifolia
tcaacttctctggtggagtgatcacacaataatcgggtccttcttcgactgttgctcccaactgaacaaggttacaaatgcaaaaacgtcttttagcattaaacaataatgggttgaaagctgtttaagagtaatatggttatattgactcgtacctttcttagttctgtgcaaatggcaatcatcctttcggtttcttt

SEQ ID NO: 905 - DNA, 200 bp, Ambrosia artemisiifolia
gtgatcactccaccagagaagttgaacgtgacagccatcgacacatatgatgatcacagaatggccatggcattctcccttgctgcatgcgcagacgttcctgtcactatcaaggaccccggctgcacccgtaagactttcccagactactttgaagttcttgagagattcacaaagcattaaacagaatctttatggct

SEQ ID NO: 906 - DNA, 200 bp, Ambrosia artemisiifolia
agccataaagattctgtttaatgctttgtgaatctctcaagaacttcaaagtagtctgggaaagtcttacgggtgcagccggggtccttgatagtgacaggaacgtctgcgcatgcagcaagggagaatgccatggccattctgtgatcatcatatgtgtcgatggctgtcacgttcaacttctctggtggagtgatcac

SEQ ID NO: 907 - DNA, 200 bp, Ambrosia artemisiifolia
agcattaaacagaatctttatggctgaaatgctcccttcacctgttgtctttctttacatataattggtctttttttatgttaaggttgtagctttctctgagatggatctgagtgtaattttaaatcttttgcaaaaatatgttagcaatgtatgtttttttgatgcatattaaatgtgctattataataaaagtgttt

SEQ ID NO: 908 - DNA, 200 bp, Ambrosia artemisiifolia
aaacacttttattataatagcacatttaatatgcatcaaaaaaacatacattgctaacatatttttgcaaaagatttaaaattacactcagatccatctcagagaaagctacaaccttaacataaaaaaagaccaattatatgtaaagaaagacaacaggtgaagggagcatttcagccataaagattctgtttaatgct

SEQ ID NO: 909 - DNA, 200 bp, Ambrosia artemisiifolia
atgtgctattataataaaagtgtttttttgactcttgaagacataaaggtgtaaccttgatgctcaaattagcatgttgaacatgataacttttaaggggtgtgacacaatgttaagcttttgaatccctcttgcaaaagtcctatgtttgactttggctcctaccggtattatgtgcccagtgcaagtggtgttttacc

SEQ ID NO: 910 - DNA, 200 bp, Ambrosia artemisiifolia
ggtaaaacaccacttgcactgggcacataataccggtaggagccaaagtcaaacataggacttttgcaagagggattcaaaagcttaacattgtgtcacaccccttaaaagttatcatgttcaacatgctaatttgagcatcaaggttacacctttatgtcttcaagagtcaaaaaaacacttttattataatagcacat

SEQ ID NO: 911 - DNA, 200 bp, Ambrosia artemisiifolia
tgcccagtgcaagtggtgttttacctaatcccgttagttagcactcaacatggtattggtgaggtcctgtgagttttccggtaacatgttcttgtcgtctaaaaaatagcacatggaggcttcaaattattgatctttttatgctgaataagtgtatatgttttgctaacagaagtggcaatgagttgtaaatcttgaaa

SEQ ID NO: 912 - DNA, 200 bp, Ambrosia artemisiifolia
tttcaagatttacaactcattgccacttctgttagcaaaacatatacacttattcagcataaaaagatcaataatttgaagcctccatgtgctattttttagacgacaagaacatgttaccggaaaactcacaggacctcaccaataccatgttgagtgctaactaacgggattaggtaaaacaccacttgcactgggca

SEQ ID NO: 913 - DNA, 200 bp, Ambrosia artemisiifolia
ttgtttattagcgtgttttctttttgttatttttcagttgctagctggagagtcaaagaaaccgaaaggatgattgccatttgcacagaactcagaaaggtaaaacagcgcattatccgatcatagcacttatgaataagtcactatatatggggtattgttcacctcaaagaagttaaataaaataaaaaattatatgt

SEQ ID NO: 914 - DNA, 200 bp, Ambrosia artemisiifolia
acatataattttttattttatttaacttctttgaggtgaacaataccccatatatagtgacttattcataagtgctatgatcggataatgcgctgttttacctttctgagttctgtgcaaatggcaatcatcctttcggtttctttgactctccagctagcaactgaaaaataacaaaaagaaaacacgctaataaacaa

SEQ ID NO: 915 - DNA, 200 bp, Ambrosia artemisiifolia
tttttcttccacaattggaatttaccacatatccctaaaatatataaaaaatatagttgttttacattttatacaagacaggtgcgcagcgatgatcatataaaccaacatgtatctatatataaaattgtagatgcaaagacttcccgtcggctttggtaaattaatgacatcatttctcctgatatttggcagtggct

SEQ ID NO: 916 - DNA, 200 bp, Ambrosia artemisiifolia
agccactgccaaatatcaggagaaatgatgtcattaatttaccaaagccgacgggaagtctttgcatctacaattttatatatagatacatgttggtttatatgatcatcgctgcgcacctgtcttgtataaaatgtaaaacaactatattttttatatattttagggatatgtggtaaattccaattgtggaagaaaaa

SEQ ID NO: 917 - DNA, 200 bp, Ambrosia artemisiifolia
tttctcctgatatttggcagtggctagctggagagtaaaagaaaccgaaaggatgattgccatttgcacagaactaagaaaggtacgagttataaccatattactcttaaacagccttcaacccattattgtttaatatgctaaaagactcgtttgcatttgtaacattttcagttgggagcaacagtcgaagagggacc

SEQ ID NO: 918 - DNA, 200 bp, Ambrosia artemisiifolia
ggtccctcttcgactgttgctcccaactgaaaatgttacaaatgcaaacgagtcttttagcatattaaacaataatgggttgaaggctgtttaagagtaatatggttataactcgtacctttcttagttctgtgcaaatggcaatcatcctttcggtttcttttactctccagctagccactgccaaatatcaggagaaa

SEQ ID NO: 919 - DNA, 200 bp, Ambrosia artemisiifolia
tgggagcaacagtcgaagagggacccgattattgtgtgatcactccaccagagaagttgaacgtgacagccatcgacacgtatgatgatcacagaatggccatggcattctcccttgcagcatgcgcagacgttcctgtcactatcaaggaccccggctgcacccgtaagactttcccagactactttgaagttcttgaa

SEQ ID NO: 920 - DNA, 200 bp, Ambrosia artemisiifolia
ttcaagaacttcaaagtagtctgggaaagtcttacgggtgcagccggggtccttgatagtgacaggaacgtctgcgcatgctgcaagggagaatgccatggccattctgtgatcatcatacgtgtcgatggctgtcacgttcaacttctctggtggagtgatcacacaataatcgggtccctcttcgactgttgctccca

SEQ ID NO: 921 - DNA, 200 bp, Ambrosia artemisiifolia
cccagactactttgaagttcttgaaagattcacaaagcattaaacagaatctttatggctgaaatgctcccttcacctgttgtctttctttacatataaaattggtcctttttttatgttaaggttgtagctttctctgagatggatctgagtgtaattttaaatcttttgcaaaaatatgttagcaatgtatgtttttt

SEQ ID NO: 922 - DNA, 200 bp, Ambrosia artemisiifolia
aaaaaacatacattgctaacatatttttgcaaaagatttaaaattacactcagatccatctcagagaaagctacaaccttaacataaaaaaaggaccaattttatatgtaaagaaagacaacaggtgaagggagcatttcagccataaagattctgtttaatgctttgtgaatctttcaagaacttcaaagtagtctggg

SEQ ID NO: 923 - DNA, 200 bp, Ambrosia artemisiifolia
aatatgttagcaatgtatgttttttgatgcatattaaatgtgctattataataaaagtgtttttgactcttgaagacataaaggtgtaaccttgatgccatgggcgaaccttttaaggggcgggagggagcgcccccctcgaattttcgctcagaagttgcgattaaatgtcctatgtttgacttcggctcttaccggta

SEQ ID NO: 924 - DNA, 200 bp, Ambrosia artemisiifolia
taccggtaagagccgaagtcaaacataggacatttaatcgcaacttctgagcgaaaattcgaggggggcgctccctcccgccccttaaaaggttcgcccatggcatcaaggttacacctttatgtcttcaagagtcaaaaacacttttattataatagcacatttaatatgcatcaaaaaacatacattgctaacatatt

SEQ ID NO: 925 - DNA, 200 bp, Ambrosia trifida
aacaaacacaatggcgattcacattaacaacatatccaacttcacaaccatctcaccaatacccacaaccccaaatcattaccatcatcttttttatcttttggatccaaattcaacaaccccatgaatcttgcatctctttcttgcaaccaaaccattaataaaagatcacttgctgttgcagcttctgttgctaccac

SEQ ID NO: 926 - DNA, 200 bp, Ambrosia trifida
gtggtagcaacagaagctgcaacagcaagtgatcttttattaatggtttggttgcaagaaagagatgcaagattcatggggttgttgaatttggatccaaaagataaaaaagatgatggtaatgatttggggttgtgggtattggtgagatggttgtgaagttggatatgttgttaatgtgaatcgccattgtgtttgtt

SEQ ID NO: 927 - DNA, 200 bp, Ambrosia trifida
ctgttgcagcttctgttgctaccacagagaagtcctctgttgaagagattgtgttgaagcccattaaagagatttctggaactgttaacttacctggatccaagtctttgtctaatcggatccttcttttagctgctcttgctgaggggactactgttgtagacaacttattgaatagtgacgatgttcattatatgctt

SEQ ID NO: 928 - DNA, 200 bp, Ambrosia trifida
aagcatataatgaacatcgtcactattcaataagttgtctacaacagtagtcccctcagcaagagcagctaaaagaaggatccgattagacaaagacttggatccaggtaagttaacagttccagaaatctctttaatgggcttcaacacaatctcttcaacagaggacttctctgtggtagcaacagaagctgcaacag

SEQ ID NO: 929 - DNA, 200 bp, Ambrosia trifida
tagtgacgatgttcattatatgcttggagctttgagagctctagggttaaacgttgaagaaaatggtgagatcaaaagagcaactgtggaagggtgcggtggtgtgtttccggtgggtaaagaagctaaggatgaaatccagctttttctcggaaatgcgggaactgctatgcgtccgttgactgctgcagttactgctg

SEQ ID NO: 930 - DNA, 200 bp, Ambrosia trifida
cagcagtaactgcagcagtcaacggacgcatagcagttcccgcatttccgagaaaaagctggatttcatccttagcttctttacccaccggaaacacaccaccgcacccttccacagttgctcttttgatctcaccattttcttcaacgtttaaccctagagctctcaaagctccaagcatataatgaacatcgtcacta

SEQ ID NO: 931 - DNA, 200 bp, Ambrosia trifida
ccgttgactgctgcagttactgctgctggtggaaactcaagctacatactagatggtgttccccgaatgagagagagaccaatcggtgatttagtcacaggtcttaaacaacttggtgccgatgttgattgcttccttggtacaaattgcccacctgttcgtgtagctgccaatggaggccttcctggtggaaaggtcaa

SEQ ID NO: 932 - DNA, 200 bp, Ambrosia trifida
ttgacctttccaccaggaaggcctccattggcagctacacgaacaggtgggcaatttgtaccaaggaagcaatcaacatcggcaccaagttgtttaagacctgtgactaaatcaccgattggtctctctctcattcggggaacaccatctagtatgtagcttgagtttccaccagcagcagtaactgcagcagtcaacgg

SEQ ID NO: 933 - DNA, 200 bp, Ambrosia trifida
gaggccttcctggtggaaaggtcaaactgtcgggatctattagtagtcaatacttgacggctctgcttatggcagctccgcttgcactgggagatgtagagatagaaattatagataaattaatatctgtaccttatgtagagatgacactgaaattgatggaacggtttggtgtttctgtagaacatagcgatagttgg

SEQ ID NO: 934 - DNA, 200 bp, Ambrosia trifida
ccaactatcgctatgttctacagaaacaccaaaccgttccatcaatttcagtgtcatctctacataaggtacagatattaatttatctataatttctatctctacatctcccagtgcaagcggagctgccataagcagagccgtcaagtattgactactaatagatcccgacagtttgacctttccaccaggaaggcctc

SEQ ID NO: 935 - DNA, 200 bp, Ambrosia trifida
ttctgtagaacatagcgatagttgggacaagttttatgtccgaggtggtcaaaagtacaagtcacctggaaatgcttacgtggaaggtgatgcttcaagcgcaagttacttcttagctggtgctgccattaccggcggcaccgttacggtggaaggttgtgggacaagcagtttacagggggatgtaaagtttgctgagg

SEQ ID NO: 936 - DNA, 200 bp, Ambrosia trifida
cctcagcaaactttacatccccctgtaaactgcttgtcccacaaccttccaccgtaacggtgccgccggtaatggcagcaccagctaagaagtaacttgcgcttgaagcatcaccttccacgtaagcatttccaggtgacttgtacttttgaccacctcggacataaaacttgtcccaactatcgctatgttctacagaa

SEQ ID NO: 937 - DNA, 200 bp, Ambrosia trifida
cagggggatgtaaagtttgctgaggtcctcggacaaatgggtgcagaagtaacatggacagagaactcagtgacggtgaagggcccgccaagaaacgcttccggaaggggacacttgcgtccagtcgatgttaacatgaacaaaatgccagatgttgccatgacgcttgcagtcgttgccctttatgccgacggtcccac

SEQ ID NO: 938 - DNA, 200 bp, Ambrosia trifida
gtgggaccgtcggcataaagggcaacgactgcaagcgtcatggcaacatctggcattttgttcatgttaacatcgactggacgcaagtgtccccttccggaagcgtttcttggcgggcccttcaccgtcactgagttctctgtccatgttacttctgcacccatttgtccgaggacctcagcaaactttacatccccctg

SEQ ID NO: 939 - DNA, 200 bp, Ambrosia trifida
ttgccctttatgccgacggtcccacagccattagagacgtggctagctggagagtaaaagaaaccgaaaggatgattgctatttgcacagaactaagaaagttgggagcaacagtcgaagaaggacccgattattgtgtgatcactccaccagagaagttgaacgtgacagccatcgacacgtatgatgatcacagaatg

SEQ ID NO: 940 - DNA, 200 bp, Ambrosia trifida
cattctgtgatcatcatacgtgtcgatggctgtcacgttcaacttctctggtggagtgatcacacaataatcgggtccttcttcgactgttgctcccaactttcttagttctgtgcaaatagcaatcatcctttcggtttcttttactctccagctagccacgtctctaatggctgtgggaccgtcggcataaagggcaa

SEQ ID NO: 941 - DNA, 200 bp, Ambrosia trifida
cgacacgtatgatgatcacagaatggccatggcattctcccttgctgcatgcgcagacgttcctgtcactatcaaggaccccggctgcacgcgtaagaccttcccagactactttgaagttcttgaaagattcacaaagcattaaacagaatctttatggctgaaatgctcccttcacctgttgtctttctttacgtata

SEQ ID NO: 942 - DNA, 200 bp, Ambrosia trifida
tatacgtaaagaaagacaacaggtgaagggagcatttcagccataaagattctgtttaatgctttgtgaatctttcaagaacttcaaagtagtctgggaaggtcttacgcgtgcagccggggtccttgatagtgacaggaacgtctgcgcatgcagcaagggagaatgccatggccattctgtgatcatcatacgtgtcg

SEQ ID NO: 943 - DNA, 26 bp, Ambrosia trifida
actagtttcggggggtcgaaaccgta

SEQ ID NO: 944 - DNA, 26 bp, Ambrosia trifida
tacggtttcgaccccccgaaactagt

SEQ ID NO: 945 - DNA, 200 bp, Ambrosia trifida
acttaatgattcagcacttaaccgttcagacctcataatgattcagcactttatcaaccaaacaaccccttagttaataggaatctgtactggttttgcattttacatagcactaacatatgatgaaaagattgctattcgtcatctatttggtacaaacttagttgttcatagttgtttcgactttcgtctatggaaat

SEQ ID NO: 946 - DNA, 200 bp, Ambrosia trifida
atttccatagacgaaagtcgaaacaactatgaacaactaagtttgtaccaaatagatgacgaatagcaatcttttcatcatatgttagtgctatgtaaaatgcaaaaccagtacagattcctattaactaaggggttgtttggttgataaagtgctgaatcattatgaggtctgaacggttaagtgctgaatcattaagt

SEQ ID NO: 947 - DNA, 200 bp, Ambrosia trifida
tgtttcgactttcgtctatggaaatcatgaaagcttaaatcgatttaaaccattcacggttcgcctccatattgcatgtctgcttatgtattaactgaatgcatgtattttcatgatatgaatatttgatttgatcattgatttgaaatagtgtttttgtcatgagcatatagagttcgaccatttgttatagtgtgaat

SEQ ID NO: 948 - DNA, 200 bp, Ambrosia trifida
attcacactataacaaatggtcgaactctatatgctcatgacaaaaacactatttcaaatcaatgatcaaatcaaatattcatatcatgaaaatacatgcattcagttaatacataagcagacatgcaatatggaggcgaaccgtgaatggtttaaatcgatttaagctttcatgatttccatagacgaaagtcgaaaca

SEQ ID NO: 949 - DNA, 200 bp, Ambrosia trifida
ttcgaccatttgttatagtgtgaatttgtcaagctataaattcatctacgccacttcagcaaactatttcattgacatttttagccttcagtttatatttaacagatctaagtgaattgatattttcaggggactattgttgtagacaacttattgaatagtgatgatgttcattatatgcttggagctttgagagctct

SEQ ID NO: 950 - DNA, 200 bp, Ambrosia trifida
agagctctcaaagctccaagcatataatgaacatcatcactattcaataagttgtctacaacaatagtcccctgaaaatatcaattcacttagatctgttaaatataaactgaaggctaaaaatgtcaatgaaatagtttgctgaagtggcgtagatgaatttatagcttgacaaattcacactataacaaatggtcgaa

SEQ ID NO: 951 - DNA, 200 bp, Ambrosia trifida
atatgcttggagctttgagagctctagggttaaatgttgaagaaaatggtgagatcaaaagagcaactgtggaagggtgcggtggtgtgtttccggtgggtaaagaagccaaggatgaaatccagctttttcttggaaatgccggaactgctatgcgttcgttgactgctgcagttactgctgctggtggaaactcaagg

SEQ ID NO: 952 - DNA, 200 bp, Ambrosia trifida
ccttgagtttccaccagcagcagtaactgcagcagtcaacgaacgcatagcagttccggcatttccaagaaaaagctggatttcatccttggcttctttacccaccggaaacacaccaccgcacccttccacagttgctcttttgatctcaccattttcttcaacatttaaccctagagctctcaaagctccaagcatat

SEQ ID NO: 953 - DNA, 200 bp, Ambrosia trifida
tactgctgctggtggaaactcaaggtatttttaaataggacactattaataagggtctgcatgtgtcgggtcgggttgttgtattaaataaaatgataaaaactataccgttaaaaataataccctgataagcgatatcaaagattataagcatttaagaacaccttacctgattcttttgcccgttttcttttaagcta

SEQ ID NO: 954 - DNA, 200 bp, Ambrosia trifida
tagcttaaaagaaaacgggcaaaagaatcaggtaaggtgttcttaaatgcttataatctttgatatcgcttatcagggtattatttttaacggtatagtttttatcattttatttaatacaacaacccgacccgacacatgcagacccttattaatagtgtcctatttaaaaataccttgagtttccaccagcagcagta

SEQ ID NO: 955 - DNA, 200 bp, Ambrosia trifida
atattagatttgtgtatttcaaaaatctttttagaaaataaactagtaataatatattcatgacaaaataatattattgtgtgggttggtaagatgttgggggtggttggtgaaggaaatgacactctaaaaagccgccaccaaactccccaccctttcaaaatcttgcttctccacgcaataaattcttcatctttttc

SEQ ID NO: 956 - DNA, 200 bp, Ambrosia trifida
gaaaaagatgaagaatttattgcgtggagaagcaagattttgaaagggtggggagtttggtggcggctttttagagtgtcatttccttcaccaaccacccccaacatcttaccaacccacacaataatattattttgtcatgaatatattattactagtttattttctaaaaagatttttgaaatacacaaatctaatat

SEQ ID NO: 957 - DNA, 200 bp, Ambrosia trifida
acgcaataaattcttcatctttttctctgcaaatcacaaacaaacacaatggcgattcacattaacaacatatccaacttcacaaccaatctcaccaatacccacaaccccaaatcattaccatcatcttttttatcttttggatccaaattcaacaaccccatgaatcttgcatctctttcttccacccaaaccattaa

SEQ ID NO: 958 - DNA, 200 bp, Ambrosia trifida
ttaatggtttgggtggaagaaagagatgcaagattcatggggttgttgaatttggatccaaaagataaaaaagatgatggtaatgatttggggttgtgggtattggtgagattggttgtgaagttggatatgttgttaatgtgaatcgccattgtgtttgtttgtgatttgcagagaaaaagatgaagaatttattgcgt

SEQ ID NO: 959 - DNA, 200 bp, Ambrosia trifida
ctctttcttccacccaaaccattaataaaagatcacttgctgttgcagcttctgttgctaccacagagaagtcatcagttgaagagattgtgttgaagcccattaaagagatttctggaactgttaacttacctggatccaagtctttgtctaatcggatccttcttttagctgctcttgctgaggtatggttattgtta

SEQ ID NO: 960 - DNA, 200 bp, Ambrosia trifida
taacaataaccatacctcagcaagagcagctaaaagaaggatccgattagacaaagacttggatccaggtaagttaacagttccagaaatctctttaatgggcttcaacacaatctcttcaactgatgacttctctgtggtagcaacagaagctgcaacagcaagtgatcttttattaatggtttgggtggaagaaagag

SEQ ID NO: 961 - DNA, 200 bp, Ambrosia trifida
atgctacagggcacaacagtggtcgacaacttgctgtatagtgatgatattctttatatgttggacgctctcagaactcttggtttaaaagtggaggatgatagtacagccaaaagggcagtcgtagagggttgtggtggtctgtttcctgttggtaaagatggaaaggaagagattcaacttttccttggtaatgcagg

SEQ ID NO: 962 - DNA, 200 bp, Ambrosia trifida
cctgcattaccaaggaaaagttgaatctcttcctttccatctttaccaacaggaaacagaccaccacaaccctctacgactgcccttttggctgtactatcatcctccacttttaaaccaagagttctgagagcgtccaacatataaagaatatcatcactatacagcaagttgtcgaccactgttgtgccctgtagcat

SEQ ID NO: 963 - DNA, 200 bp, Ambrosia trifida
ttcaacttttccttggtaatgcaggaacagcgatgcgcccattgacagctgcggttgccgttgctggaggaaattcaaggtttgtccaattatattctttatgtgagtgttgttttttgtgttagtctcaatcatgaaggtactaatgcagaagccgtacccctgaaattttcttattttgtatatatcaattggtaatt

SEQ ID NO: 964 - DNA, 200 bp, Ambrosia trifida
aattaccaattgatatatacaaaataagaaaatttcaggggtacggcttctgcattagtaccttcatgattgagactaacacaaaaaacaacactcacataaagaatataattggacaaaccttgaatttcctccagcaacggcaaccgcagctgtcaatgggcgcatcgctgttcctgcattaccaaggaaaagttgaa

SEQ ID NO: 965 - DNA, 200 bp, Ambrosia trifida
ttgaagagattgtgttgaagcccattaaagagatttctggaactgttaacttacctggatccaagtctttgtctaatcggatccttcttttagctgctcttgctgagggcacaacagtggtcgacaacttgctgtatagtgatgatattctttatatgttggacgctctcagaactcttggtttaaaagtggaggatgat

SEQ ID NO: 966 - DNA, 200 bp, Ambrosia trifida
atcatcctccacttttaaaccaagagttctgagagcgtccaacatataaagaatatcatcactatacagcaagttgtcgaccactgttgtgccctcagcaagagcagctaaaagaaggatccgattagacaaagacttggatccaggtaagttaacagttccagaaatctctttaatgggcttcaacacaatctcttcaa

SEQ ID NO: 967 - DNA, 200 bp, Ambrosia trifida
tcttggtttaaaagtggaggatgatagtacagccaaaagggcagtcgtagagggttgtggtggtctgtttcctgttggtaaagatggaaaggaagagattcaacttttccttggtaatgcaggaacagcgatgcgcccattgacagctgcggttgccgttgctggaggaaattcaagctacatactagatggtgttcccc

SEQ ID NO: 968 - DNA, 200 bp, Ambrosia trifida
ggggaacaccatctagtatgtagcttgaatttcctccagcaacggcaaccgcagctgtcaatgggcgcatcgctgttcctgcattaccaaggaaaagttgaatctcttcctttccatctttaccaacaggaaacagaccaccacaaccctctacgactgcccttttggctgtactatcatcctccacttttaaaccaaga

SEQ ID NO: 969 - DNA, 200 bp, Ambrosia trifida
agctacatactagatggtgttccccgaatgagagagagaccaatcggtgatttagtcactggtcttaaacaacttggtgcagatgttgattgtttccttggtacaaattgcccacctgttcgtgtagctgccaatggaggccttcctggtggaaaggtcaaactgtcgggatctattagtagtcaatacttgacggctct

SEQ ID NO: 970 - DNA, 200 bp, Ambrosia trifida
agagccgtcaagtattgactactaatagatcccgacagtttgacctttccaccaggaaggcctccattggcagctacacgaacaggtgggcaatttgtaccaaggaaacaatcaacatctgcaccaagttgtttaagaccagtgactaaatcaccgattggtctctctctcattcggggaacaccatctagtatgtagct

SEQ ID NO: 971 - DNA, 200 bp, Ambrosia trifida
ttagtagtcaatacttgacggctctgcttatggcagctccgcttgcactgggagatgtagagatagaaattatagataaattaatatctgtaccttatgtagagatgacactgaaattgatggaacggtttggtgtttctgtagaacatagcgatagttgggacaagttttatgtccgaggtggtcaaaagtacaagtca

SEQ ID NO: 972 - DNA, 200 bp, Ambrosia trifida
tgacttgtacttttgaccacctcggacataaaacttgtcccaactatcgctatgttctacagaaacaccaaaccgttccatcaatttcagtgtcatctctacataaggtacagatattaatttatctataatttctatctctacatctcccagtgcaagcggagctgccataagcagagccgtcaagtattgactactaa

SEQ ID NO: 973 - DNA, 200 bp, Ambrosia trifida
ccgaggtggtcaaaagtacaagtcacctggaaatgcttacgtagaaggtgatgcttcaagcgcaagttacttcttagctggtgctgccattaccggcggcaccgttacggtggaaggttgtgggaccagcagtttacagggtgatgtgaaatttgcggaggttcttggacaaatgggggctgaagtaacatggaccgaaa

SEQ ID NO: 974 - DNA, 200 bp, Ambrosia trifida
tttcggtccatgttacttcagcccccatttgtccaagaacctccgcaaatttcacatcaccctgtaaactgctggtcccacaaccttccaccgtaacggtgccgccggtaatggcagcaccagctaagaagtaacttgcgcttgaagcatcaccttctacgtaagcatttccaggtgacttgtacttttgaccacctcgg

SEQ ID NO: 975 - DNA, 200 bp, Ambrosia trifida
ggggctgaagtaacatggaccgaaaactctgttacggtgaagggcccaccgagggatgcttttggaaggaaacatttgcgtgctgtagatgtcaacatgaacaaaatgcctgatgttgccatgactcttgccgtggttgctctatatgcagatggtcctacagccattagagatgttgctagttggagagtcaaagaaac

SEQ ID NO: 976 - DNA, 200 bp, Ambrosia trifida
gtttctttgactctccaactagcaacatctctaatggctgtaggaccatctgcatatagagcaaccacggcaagagtcatggcaacatcaggcattttgttcatgttgacatctacagcacgcaaatgtttccttccaaaagcatccctcggtgggcccttcaccgtaacagagttttcggtccatgttacttcagcccc

SEQ ID NO: 977 - DNA, 200 bp, Ambrosia trifida
ttgctagttggagagtcaaagaaaccgaaaggatgattgccatttgcacagaactcagaaagttgggagcgacagttgaagaagggccagactactgtgtgatcactccaccagagcggttgaatgtggcagcaatagacacgtacgatgatcacaggatggccatggctttctcccttgccgcctgtgcagatgttcct

SEQ ID NO: 978 - DNA, 200 bp, Ambrosia trifida
aggaacatctgcacaggcggcaagggagaaagccatggccatcctgtgatcatcgtacgtgtctattgctgccacattcaaccgctctggtggagtgatcacacagtagtctggcccttcttcaactgtcgctcccaactttctgagttctgtgcaaatggcaatcatcctttcggtttctttgactctccaactagcaa

SEQ ID NO: 979 - DNA, 200 bp, Ambrosia trifida
gatcagaccggtccactcttgttttaatttgagacaattttgatgttgagtcatcccacaccaaccccaaaaaattcaacaacaaactcttataatgattccctctactctactagagtctacaccaaccgactttctctttgcccaccaaaactttggtttggtaagaactaagcccccttctttcccttctctctctt

SEQ ID NO: 980 - DNA, 200 bp, Ambrosia trifida
aagagagagaagggaaagaagggggcttagttcttaccaaaccaaagttttggtgggcaaagagaaagtcggttggtgtagactctagtagagtagagggaatcattataagagtttgttgttgaattttttggggttggtgtgggatgactcaacatcaaaattgtctcaaattaaaacaagagtggaccggtctgatc

SEQ ID NO: 981 - DNA, 200 bp, Ambrosia trifida
gttttaatatggtttttcagctacatactagatggtgttccccgaatgagagagagaccaattggcgatttagtcactggtcttaaacaacttggtgccgatgttgattgcttccttggtacaaattgcccacctgttcgtgtagctgccaatggaggccttcctggtggaaaggtaaccaacatttgattgttaattac

SEQ ID NO: 982 - DNA, 200 bp, Ambrosia trifida
gtaattaacaatcaaatgttggttacctttccaccaggaaggcctccattggcagctacacgaacaggtgggcaatttgtaccaaggaagcaatcaacatcggcaccaagttgtttaagaccagtgactaaatcgccaattggtctctctctcattcggggaacaccatctagtatgtagctgaaaaaccatattaaaac

SEQ ID NO: 983 - DNA, 200 bp, Ambrosia trifida
gttttggtatgttatccaaccctccgtttttccgcctctagtcaaaatgagctatttctaaatgacttgtttttctgacacacttctatgattctttttagctgaatgaagggtgatgtgaaatttgcggaggttcttggacaaatgggggctgaagtaacatggaccgaaaactctgttacggtgaagggcccaccgag

SEQ ID NO: 984 - DNA, 200 bp, Ambrosia trifida
ctcggtgggcccttcaccgtaacagagttttcggtccatgttacttcagcccccatttgtccaagaacctccgcaaatttcacatcacccttcattcagctaaaaagaatcatagaagtgtgtcagaaaaacaagtcatttagaaatagctcattttgactagaggcggaaaaacggagggttggataacataccaaaac

SEQ ID NO: 985 - DNA, 200 bp, Ambrosia trifida
ctgttacggtgaagggcccaccgagggatgcttttggaaggaaacatttgcgtgctgtagatgtcaacatgaacaaaatgcctgatgttgccatgactcttgccgtggttgctctatatgcagatggtcctacagccattagagatggtactttcatcaattcccaacaacccctagatgcccatttttcggattttcta

SEQ ID NO: 986 - DNA, 200 bp, Ambrosia trifida
tagaaaatccgaaaaatgggcatctaggggttgttgggaattgatgaaagtaccatctctaatggctgtaggaccatctgcatatagagcaaccacggcaagagtcatggcaacatcaggcattttgttcatgttgacatctacagcacgcaaatgtttccttccaaaagcatccctcggtgggcccttcaccgtaacag

SEQ ID NO: 987 - DNA, 200 bp, Ambrosia trifida
agatgcccatttttcggattttctattcattataatttatatgcagtttggttgttaattagcgtgtgctcttttttgttatttttcagttgctagttggagagtcaaagaaaccgaaaggatgattgccatttgcacagaactcagaaaggtaaaacagcccatccttcaaaattggtctatttagaagacttagatta

SEQ ID NO: 988 - DNA, 200 bp, Ambrosia trifida
taatctaagtcttctaaatagaccaattttgaaggatgggctgttttacctttctgagttctgtgcaaatggcaatcatcctttcggtttctttgactctccaactagcaactgaaaaataacaaaaaagagcacacgctaattaacaaccaaactgcatataaattataatgaatagaaaatccgaaaaatgggcatct

SEQ ID NO: 989 - DNA, 200 bp, Ambrosia trifida
tggtctatttagaagacttagattattatattgacattaacgcattaatatttataaaaatatggacaaaatattgttatgcgtcgacctaatctccctggcccgtactagaacatgacaagttttttgacccgttacgccgtcttgttacctctgctcatactcatctaacactttacgggtcaacaactttttcagtt

SEQ ID NO: 990 - DNA, 200 bp, Ambrosia trifida
aactgaaaaagttgttgacccgtaaagtgttagatgagtatgagcagaggtaacaagacggcgtaacgggtcaaaaaacttgtcatgttctagtacgggccagggagattaggtcgacgcataacaatattttgtccatatttttataaatattaatgcgttaatgtcaatataataatctaagtcttctaaatagacca

SEQ ID NO: 991 - DNA, 200 bp, Ambrosia trifida
ttacgggtcaacaactttttcagttgggagcgacagttgaagaagggccagactactgtgtgatcactccaccagagcggttgaatgtggcagcaatagacacgtacgatgatcacaggatggccatggctttctcccttgccgcctgtgcagatgttcctgtcaccatcaaggatcctgcttgcactcgtaagacgttt

SEQ ID NO: 992 - DNA, 200 bp, Ambrosia trifida
aaacgtcttacgagtgcaagcaggatccttgatggtgacaggaacatctgcacaggcggcaagggagaaagccatggccatcctgtgatcatcgtacgtgtctattgctgccacattcaaccgctctggtggagtgatcacacagtagtctggcccttcttcaactgtcgctcccaactgaaaaagttgttgacccgtaa

SEQ ID NO: 993 - DNA, 200 bp, Ambrosia trifida
tcctgcttgcactcgtaagacgtttccagattactttgaagttcttgaaagattcacaaagcattaaacagaatctttatggctgaaatgctctctttacctgttgtgtttcacatataattggtcctttttttttatgttaaggttgtagctttctctgagatggatctgagtgtaattttaaatcttttgcaaaaata

SEQ ID NO: 994 - DNA, 200 bp, Ambrosia trifida
tatttttgcaaaagatttaaaattacactcagatccatctcagagaaagctacaaccttaacataaaaaaaaaggaccaattatatgtgaaacacaacaggtaaagagagcatttcagccataaagattctgtttaatgctttgtgaatctttcaagaacttcaaagtaatctggaaacgtcttacgagtgcaagcagga

SEQ ID NO: 995 - DNA, 200 bp, Ambrosia trifida
taattttaaatcttttgcaaaaatatgttagcaatgtatgttttttttgatgcatattaaatgtgctattataataaaagtgtttttgattcttgaagacataaaggtgtaaccttgatgctcaaattatgtaacataatgttaagcttttgaatccctcttgcaaatgtcccatgtttgacttcggctcttactggtat

SEQ ID NO: 996 - DNA, 200 bp, Ambrosia trifida
ataccagtaagagccgaagtcaaacatgggacatttgcaagagggattcaaaagcttaacattatgttacataatttgagcatcaaggttacacctttatgtcttcaagaatcaaaaacacttttattataatagcacatttaatatgcatcaaaaaaaacatacattgctaacatatttttgcaaaagatttaaaatta

SEQ ID NO: 997 - DNA, 200 bp, Ambrosia trifida
gtttgacttcggctcttactggtattatgtgctcagcgcaagtggtgttttacctaattccgttaggtggcactcaacatggtattggtggggttctgtgagttttccggtaacatgttctcattgtttagagaaaaaaaatgcacatggaggcttcaaattgttcatctatttgtgttgaataatttatatgttgctag

SEQ ID NO: 998 - DNA, 200 bp, Ambrosia trifida
ctagcaacatataaattattcaacacaaatagatgaacaatttgaagcctccatgtgcattttttttctctaaacaatgagaacatgttaccggaaaactcacagaaccccaccaataccatgttgagtgccacctaacggaattaggtaaaacaccacttgcgctgagcacataataccagtaagagccgaagtcaaac

SEQ ID NO: 999 - DNA, 200 bp, Ambrosia trifida
tactactacgtgttcttaggtgaaaactcacacacaatggcagctcacgttagcaacgttgctcatatctccaaacatccaattcaatctttaataatctttccaaatcccaaaccccttcttccaagtcctcgcctttcttatcttttggatccaaatacaaaaccccatttacccatttctcttattcatctaataac

SEQ ID NO: 1000 - DNA, 200 bp, Ambrosia trifida
gttattagatgaataagagaaatgggtaaatggggttttgtatttggatccaaaagataagaaaggcgaggacttggaagaaggggtttgggatttggaaagattattaaagattgaattggatgtttggagatatgagcaacgttgctaacgtgagctgccattgtgtgtgagttttcacctaagaacacgtagtagta

SEQ ID NO: 1001 - DNA, 200 bp, Ambrosia trifida
ccatttctcttattcatctaataacagaaagcttttcactgtttctgcttctgttgctgccacgtcagcaataccggagatagtgttgcaacccattaaagagatttcgggtactgttaatttgcctggctctaagtctctgtctaatcggattcttcttcttgctgctctttctcagggaacaaccattgttgacaact

SEQ ID NO: 1002 - DNA, 200 bp, Ambrosia trifida
agttgtcaacaatggttgttccctgagaaagagcagcaagaagaagaatccgattagacagagacttagagccaggcaaattaacagtacccgaaatctctttaatgggttgcaacactatctccggtattgctgacgtggcagcaacagaagcagaaacagtgaaaagctttctgttattagatgaataagagaaatgg

SEQ ID NO: 1003 - DNA, 200 bp, Ambrosia trifida
cagggaacaaccattgttgacaacttacttaacagtgacgatgtccattacatgcttggggctctaagaactctaggtttacgtgttgaggaagatggtgcaattaaaagggcagttgtggaaggttgtggtggtgtttttccggtgggtagagaagctaaagatgaaatacagctttttcttggtaacgcaggaactgc

SEQ ID NO: 1004 - DNA, 200 bp, Ambrosia trifida
gcagttcctgcgttaccaagaaaaagctgtatttcatctttagcttctctacccaccggaaaaacaccaccacaaccttccacaactgcccttttaattgcaccatcttcctcaacacgtaaacctagagttcttagagccccaagcatgtaatggacatcgtcactgttaagtaagttgtcaacaatggttgttccctg

SEQ ID NO: 1005 - DNA, 200 bp, Ambrosia trifida
tttttcttggtaacgcaggaactgctatgcgccctttgactgctgcagttaccgctgctggtggtaattcaagctacatactagatggagttcctcgaatgagagagagaccaataggtgacttagtcacaggtcttaagcagcttggtgcagatgtcgactgtttcctcgggacaaactgcccgcctgtgcgtgtagtt

SEQ ID NO: 1006 - DNA, 200 bp, Ambrosia trifida
aactacacgcacaggcgggcagtttgtcccgaggaaacagtcgacatctgcaccaagctgcttaagacctgtgactaagtcacctattggtctctctctcattcgaggaactccatctagtatgtagcttgaattaccaccagcagcggtaactgcagcagtcaaagggcgcatagcagttcctgcgttaccaagaaaaa

SEQ ID NO: 1007 - DNA, 200 bp, Ambrosia trifida
aaactgcccgcctgtgcgtgtagttggaggtgggggccttcctggcggaaaggttaagctgtcaggatccattagtagccaataccttactgctttgcttatggcttccccccttgccctcggagacgtagaaattgaaattattgataaattaatttctataccctatgttgagatgacaataaaattgatggaacggt

SEQ ID NO: 1008 - DNA, 200 bp, Ambrosia trifida
accgttccatcaattttattgtcatctcaacatagggtatagaaattaatttatcaataatttcaatttctacgtctccgagggcaaggggggaagccataagcaaagcagtaaggtattggctactaatggatcctgacagcttaacctttccgccaggaaggcccccacctccaactacacgcacaggcgggcagttt

SEQ ID NO: 1009 - DNA, 200 bp, Ambrosia trifida
atgacaataaaattgatggaacggtttggtgtctcggtcgaacacagtgatagttgggacaggttcttcatcaaaggcggtcaaaagtacaagtcgcccggaaacgcgtacgtagagggtgatgcttcaagtgcaagttacttcttggctggtgctgctataactggtggcaccatcactgttgaaggttgtggaacaag

SEQ ID NO: 1010 - DNA, 200 bp, Ambrosia trifida
cttgttccacaaccttcaacagtgatggtgccaccagttatagcagcaccagccaagaagtaacttgcacttgaagcatcaccctctacgtacgcgtttccgggcgacttgtacttttgaccgcctttgatgaagaacctgtcccaactatcactgtgttcgaccgagacaccaaaccgttccatcaattttattgtcat

SEQ ID NO: 1011 - DNA, 200 bp, Ambrosia trifida
tcactgttgaaggttgtggaacaagtagcttacagggtgatgtgaaatttgcggaggttcttggacaaatgggggctgaagtaacatggaccgaaaactctgttacggtgaagggcccaccgagggatgcttctggaaggaaacatttgcgtgctgtagatgtcaacatgaacaaaatgcctgatgttgccatgactctt

SEQ ID NO: 1012 - DNA, 200 bp, Ambrosia trifida
aagagtcatggcaacatcaggcattttgttcatgttgacatctacagcacgcaaatgtttccttccagaagcatccctcggtgggcccttcaccgtaacagagttttcggtccatgttacttcagcccccatttgtccaagaacctccgcaaatttcacatcaccctgtaagctacttgttccacaaccttcaacagtga

SEQ ID NO: 1013 - DNA, 200 bp, Ambrosia trifida
aatgcctgatgttgccatgactcttgccgtggttgctctatatgcagatggtcctacagccattagagatgttgctagttggagagtcaaagaaaccgaaaggatgattgccatttgcacagaactcagaaagttgggagcgacagttgaagaagggcctgactactgtgtgatcactccaccagagcggttgaatgtgg

SEQ ID NO: 1014 - DNA, 200 bp, Ambrosia trifida
ccacattcaaccgctctggtggagtgatcacacagtagtcaggcccttcttcaactgtcgctcccaactttctgagttctgtgcaaatggcaatcatcctttcggtttctttgactctccaactagcaacatctctaatggctgtaggaccatctgcatatagagcaaccacggcaagagtcatggcaacatcaggcatt

SEQ ID NO: 1015 - DNA, 200 bp, Ambrosia trifida
actccaccagagcggttgaatgtggcagcaatagacacgtatgatgatcacaggatggccatggctttctcccttgccgcctgtgcggatgttcctgtcaccatcaaggatcctgcttgcactcgtaagacgtttccggattactttgaagttcttcagagattcaccaagcattgatgttttcaatagagtttttgttt

SEQ ID NO: 1016 - DNA, 200 bp, Ambrosia trifida
aaacaaaaactctattgaaaacatcaatgcttggtgaatctctgaagaacttcaaagtaatccggaaacgtcttacgagtgcaagcaggatccttgatggtgacaggaacatccgcacaggcggcaagggagaaagccatggccatcctgtgatcatcatacgtgtctattgctgccacattcaaccgctctggtggagt

SEQ ID NO: 1017 - DNA, 200 bp, Ambrosia trifida
tattaaataaaatgataaaaactatactgttaaaaataataccccaataagcgatatcaaagattataagcatttaaaacaccttacctgattcttttgcccgttttcttttaagctaagttgtaattttttggcggtttcactcattggagatttgtatatttgacctcagatttcatctttttataatatcttaaaaa

SEQ ID NO: 1018 - DNA, 200 bp, Ambrosia trifida
tttttaagatattataaaaagatgaaatctgaggtcaaatatacaaatctccaatgagtgaaaccgccaaaaaattacaacttagcttaaaagaaaacgggcaaaagaatcaggtaaggtgttttaaatgcttataatctttgatatcgcttattggggtattatttttaacagtatagtttttatcattttatttaata

SEQ ID NO: 1019 - DNA, 200 bp, Ambrosia trifida
tcatctttttataatatcttaaaaagttttaatatggtttttcagctacatactagatggtgttccccgaatgagagagagaccaatcggtgatttagtcactggtcttaaacaacttggtgcagatgttgattgtttccttggtacaaattgcccacctgttcgtgtagctgccaatggaggccttcctggtggaaagg

SEQ ID NO: 1020 - DNA, 200 bp, Ambrosia trifida
cctttccaccaggaaggcctccattggcagctacacgaacaggtgggcaatttgtaccaaggaaacaatcaacatctgcaccaagttgtttaagaccagtgactaaatcaccgattggtctctctctcattcggggaacaccatctagtatgtagctgaaaaaccatattaaaactttttaagatattataaaaagatga

SEQ ID NO: 1021 - DNA, 200 bp, Ambrosia trifida
tgatcagtaatcatattcatcagcttcataaagcacatccaaacaccctaaaataagtctacatacatctatgcatacgtcatatgatcttaccctttccttttgttgtttctttaaacaagggggatgtaaagtttgctgaggtccttggacaaatgggtgcagaagtaacctggacagagaactcagtgacagtgaag

SEQ ID NO: 1022 - DNA, 200 bp, Ambrosia trifida
cttcactgtcactgagttctctgtccaggttacttctgcacccatttgtccaaggacctcagcaaactttacatcccccttgtttaaagaaacaacaaaaggaaagggtaagatcatatgacgtatgcatagatgtatgtagacttattttagggtgtttggatgtgctttatgaagctgatgaatatgattactgatca

SEQ ID NO: 1023 - DNA, 200 bp, Ambrosia trifida
gacagagaactcagtgacagtgaagggcccgccaagaaacgcttccggaaggggacacttgcgtccagtcgatgttaacatgaacaaaatgccagatgttgccatgactcttgcagtcgttgccctttatgccgacggtcccacagccattagagacggtatgattgagcattttatatcttttttttaatatttttttc

SEQ ID NO: 1024 - DNA, 200 bp, Ambrosia trifida
gaaaaaaatattaaaaaaaagatataaaatgctcaatcataccgtctctaatggctgtgggaccgtcggcataaagggcaacgactgcaagagtcatggcaacatctggcattttgttcatgttaacatcgactggacgcaagtgtccccttccggaagcgtttcttggcgggcccttcactgtcactgagttctctgtc

SEQ ID NO: 1025 - DNA, 200 bp, Ambrosia trifida
tgtatatatataaaatacatatacaataccaaaacgcctaatttcgcctaattttcgcctagtccctaggctggacctcaccgcctgcctagcgcctagcgccttttgcaaccttgtaaacatcttattaataatgataccttttgtttcatctttatgtaaccttttctggtcttaatatgcaggtcaaactgtcggga

SEQ ID NO: 1026 - DNA, 200 bp, Ambrosia trifida
tcccgacagtttgacctgcatattaagaccagaaaaggttacataaagatgaaacaaaaggtatcattattaataagatgtttacaaggttgcaaaaggcgctaggcgctaggcaggcggtgaggtccagcctagggactaggcgaaaattaggcgaaattaggcgttttggtattgtatatgtattttatatatataca

SEQ ID NO: 1027 - DNA, 200 bp, Ambrosia trifida
taatatgcaggtcaaactgtcgggatctattagtagtcaatacttgacggctctgcttatggcagctccgcttgcactgggagatgtagagatagaaattatagataaattaatatctgtaccttatgtagagatgacactgaaattgatggaacggtttggtgtttctgtagaacatagcgatagttgggacaagtttt

SEQ ID NO: 1028 - DNA, 200 bp, Ambrosia trifida
aaaacttgtcccaactatcgctatgttctacagaaacaccaaaccgttccatcaatttcagtgtcatctctacataaggtacagatattaatttatctataatttctatctctacatctcccagtgcaagcggagctgccataagcagagccgtcaagtattgactactaatagatcccgacagtttgacctgcatatta

SEQ ID NO: 1029 - DNA, 200 bp, Ambrosia trifida
catagcgatagttgggacaagttttatgtccgaggtggtcaaaagtacaagtaagtctgttttttcatgaaagtcatttcctttttgtgaagattggtcgacgggtttatatggtaattatctgtttccaggtcacctggaaatgcttacgtagaaggtgatgcttcaagcgcaagttacttcttagctggtgctgccat

SEQ ID NO: 1030 - DNA, 200 bp, Ambrosia trifida
atggcagcaccagctaagaagtaacttgcgcttgaagcatcaccttctacgtaagcatttccaggtgacctggaaacagataattaccatataaacccgtcgaccaatcttcacaaaaaggaaatgactttcatgaaaaaacagacttacttgtacttttgaccacctcggacataaaacttgtcccaactatcgctatg

SEQ ID NO: 1031 - DNA, 200 bp, Ambrosia trifida
gttacttcttagctggtgctgccattaccggcggcaccgttacggtggaaggttgtgggaccagcagtttacaggtgtgatcagtaatcatattcatcagcttcataaagcacatccaaacaccccaaactatctctacttacatctatgcatacgtcatatgatcttaccctttccgtttgttgtttctttaaactagg

SEQ ID NO: 1032 - DNA, 200 bp, Ambrosia trifida
cctagtttaaagaaacaacaaacggaaagggtaagatcatatgacgtatgcatagatgtaagtagagatagtttggggtgtttggatgtgctttatgaagctgatgaatatgattactgatcacacctgtaaactgctggtcccacaaccttccaccgtaacggtgccgccggtaatggcagcaccagctaagaagtaac

SEQ ID NO: 1033 - DNA, 200 bp, Ambrosia trifida
ccgtttgttgtttctttaaactagggggatgtaaagtttgctgaggtcctcggacaaatgggtgcagaagtaacatggacagagaactcagtgacggtgaagggcccgccaagaaacgcttccggaaggggacacttgcgtccagtcgatgttaacatgaacaaaatgccagatgttgccatgacgcttgcagtcgttgc

SEQ ID NO: 1034 - DNA, 200 bp, Ambrosia trifida
gcaacgactgcaagcgtcatggcaacatctggcattttgttcatgttaacatcgactggacgcaagtgtccccttccggaagcgtttcttggcgggcccttcaccgtcactgagttctctgtccatgttacttctgcacccatttgtccgaggacctcagcaaactttacatccccctagtttaaagaaacaacaaacgg

SEQ ID NO: 1035 - DNA, 200 bp, Ambrosia trifida
tgttatgccagccctaattttattcatgtaatcacttccataacacacatccaaagttcccaacaacccctagatgcccatttttcggattttctattcattataatttatatacagtttggttgtttattagcgtgtgctcttttttgttatttttcagttgctagttggagagtcaaagaaaccgaaaggatgattgc

SEQ ID NO: 1036 - DNA, 200 bp, Ambrosia trifida
gcaatcatcctttcggtttctttgactctccaactagcaactgaaaaataacaaaaaagagcacacgctaataaacaaccaaactgtatataaattataatgaatagaaaatccgaaaaatgggcatctaggggttgttgggaactttggatgtgtgttatggaagtgattacatgaataaaattagggctggcataaca

SEQ ID NO: 1037 - DNA, 200 bp, Ambrosia trifida
tcaaagaaaccgaaaggatgattgccatttgcacagaactcagaaaggtacgagtcataataaccatattactcttaaacagcctccaaccgttattttttaacgctaaaagattctttttcatttggaaccttttcagttgggagcaacagtcgaagaaggacccgattattgtgtaatcactccaccagagaagttga

SEQ ID NO: 1038 - DNA, 200 bp, Ambrosia trifida
tcaacttctctggtggagtgattacacaataatcgggtccttcttcgactgttgctcccaactgaaaaggttccaaatgaaaaagaatcttttagcgttaaaaaataacggttggaggctgtttaagagtaatatggttattatgactcgtacctttctgagttctgtgcaaatggcaatcatcctttcggtttctttga

SEQ ID NO: 1039 - DNA, 200 bp, Ambrosia trifida
gtaatcactccaccagagaagttgaacgtgacagccatcgacacgtatgatgatcacagaatggccatggcattctcccttgctgcatgcgcagacgttcctgtcactatcaaggaccccggctgcacccgtaagactttcccagactactttgaagttcttgaaagattcacaaagcattaaacagaatctttatggct

SEQ ID NO: 1040 - DNA, 200 bp, Ambrosia trifida
agccataaagattctgtttaatgctttgtgaatctttcaagaacttcaaagtagtctgggaaagtcttacgggtgcagccggggtccttgatagtgacaggaacgtctgcgcatgcagcaagggagaatgccatggccattctgtgatcatcatacgtgtcgatggctgtcacgttcaacttctctggtggagtgattac

SEQ ID NO: 1041 - DNA, 200 bp, Ambrosia trifida
agcattaaacagaatctttatggctgaaatgctcccttcacctgttgtctttcacatataattggtcctttttttttatgttaaggttgtagctttctctgagatggatctgagtgtaattttaaatcttttgcaaaaatatgttagcaatgtatgatttttgatgcatattaaatgtgctattataataaaagtgtttt

SEQ ID NO: 1042 - DNA, 200 bp, Ambrosia trifida
aaaacacttttattataatagcacatttaatatgcatcaaaaatcatacattgctaacatatttttgcaaaagatttaaaattacactcagatccatctcagagaaagctacaaccttaacataaaaaaaaaggaccaattatatgtgaaagacaacaggtgaagggagcatttcagccataaagattctgtttaatgct

SEQ ID NO: 1043 - DNA, 200 bp, Ambrosia trifida
tgtgctattataataaaagtgtttttgactcttgaagacataaaggtgtaaccttgatgctcaaattagcatgtcacacattataactttcaaggggtgacataatgttaagcttttgaatccctcttgcaaatgtcctatatgtttgaattcggctattaccggtattatgtactcagtgcaagtggtattttacctaa

SEQ ID NO: 1044 - DNA, 200 bp, Ambrosia trifida
ttaggtaaaataccacttgcactgagtacataataccggtaatagccgaattcaaacatataggacatttgcaagagggattcaaaagcttaacattatgtcaccccttgaaagttataatgtgtgacatgctaatttgagcatcaaggttacacctttatgtcttcaagagtcaaaaacacttttattataatagcaca

SEQ ID NO: 1045 - DNA, 200 bp, Ambrosia trifida
tcagtgcaagtggtattttacctaattctgttaggtagcactcaacatggtattggtgaggtcctgtgagttttctggtaacatgttctcgtcgtttagataaaaaaaaatgcacatggaggcatcaaattattgatctttttgtgttgaatagtttatatgttgctaatagaagtggcaatgagttgtaaatcttgaaa

SEQ ID NO: 1046 - DNA, 200 bp, Ambrosia trifida
tttcaagatttacaactcattgccacttctattagcaacatataaactattcaacacaaaaagatcaataatttgatgcctccatgtgcatttttttttatctaaacgacgagaacatgttaccagaaaactcacaggacctcaccaataccatgttgagtgctacctaacagaattaggtaaaataccacttgcactga

SEQ ID NO: 1047 - DNA, 200 bp, Ambrosia trifida
ttattttcttcaatttctttggttgttttgtattttattaaaatttagtggtcaaaacaacattttagcactgatcaaccttttaatggaatgatgcagtgtgtcatgaaccgtaatttgatttataacgataaaataacaacaaatttgtgtttttatgtttacaggttaagctgtcaggatccattagtagccaatac

SEQ ID NO: 1048 - DNA, 200 bp, Ambrosia trifida
gtattggctactaatggatcctgacagcttaacctgtaaacataaaaacacaaatttgttgttattttatcgttataaatcaaattacggttcatgacacactgcatcattccattaaaaggttgatcagtgctaaaatgttgttttgaccactaaattttaataaaatacaaaacaaccaaagaaattgaagaaaataa

SEQ ID NO: 1049 - DNA, 200 bp, Ambrosia trifida
gtcaggatccattagtagccaataccttactgctttgcttatggcttccccccttgcccttggagatgtagaaattgaaattattgataaattaatttctataccctatgttgagatgacaataaaattgatggaacggtttggtgtctcagtcgaacacagtgatagttgggacaggttcttcatcaaaggcggtcaaa

SEQ ID NO: 1050 - DNA, 200 bp, Ambrosia trifida
tttgaccgcctttgatgaagaacctgtcccaactatcactgtgttcgactgagacaccaaaccgttccatcaattttattgtcatctcaacatagggtatagaaattaatttatcaataatttcaatttctacatctccaagggcaaggggggaagccataagcaaagcagtaaggtattggctactaatggatcctgac

SEQ ID NO: 1051 - DNA, 200 bp, Ambrosia trifida
aggttcttcatcaaaggcggtcaaaagtacaagtaagtctgttttttcatggaagtcattactttttttgtgaagattggtcgacgggtttatatggtaattatctgtttccaggtcacctggaaatgcttacgtagaaggtgatgcttcaagcgcaagttacttcttagctggtgctgccattaccggcggcaccgtta

SEQ ID NO: 1052 - DNA, 200 bp, Ambrosia trifida
taacggtgccgccggtaatggcagcaccagctaagaagtaacttgcgcttgaagcatcaccttctacgtaagcatttccaggtgacctggaaacagataattaccatataaacccgtcgaccaatcttcacaaaaaaagtaatgacttccatgaaaaaacagacttacttgtacttttgaccgcctttgatgaagaacct

SEQ ID NO: 1053 - DNA, 200 bp, Ambrosia trifida
gctgccattaccggcggcaccgttacggtggaaggttgtgggacaagcagtttacaggtgcatgatgacttctttttagtttaacttagaaatctctctgacttggaagtcaagtcaatggctataaacggtttttttcacgaaagaaaatatctttgtatatttggtaattttttaataaaattatcacatcttttgtg

SEQ ID NO: 1054 - DNA, 200 bp, Ambrosia trifida
cacaaaagatgtgataattttattaaaaaattaccaaatatacaaagatattttctttcgtgaaaaaaaccgtttatagccattgacttgacttccaagtcagagagatttctaagttaaactaaaaagaagtcatcatgcacctgtaaactgcttgtcccacaaccttccaccgtaacggtgccgccggtaatggcagc

SEQ ID NO: 1055 - DNA, 200 bp, Ambrosia trifida
taataaaattatcacatcttttgtgaactttctaaagaaatataaagttatgttgtttgacgtaacaagtcgcgactaaatgtgtcagtttcaattcaaagtgttaaacttgtcaatctaaagttgtacttaactgataatgggtaaaaacgtgtaatatttagcaattatctaaacgtgaaacgggtgaaatacgttga

SEQ ID NO: 1056 - DNA, 200 bp, Ambrosia trifida
tcaacgtatttcacccgtttcacgtttagataattgctaaatattacacgtttttacccattatcagttaagtacaactttagattgacaagtttaacactttgaattgaaactgacacatttagtcgcgacttgttacgtcaaacaacataactttatatttctttagaaagttcacaaaagatgtgataattttatta

SEQ ID NO: 1057 - DNA, 200 bp, Chenopodium album
tttaagaactcttgggctaaatgtagaggatgataagacagccaaaagggcaattgtggagggttgtggtggtctatttcctgctggtaaagagggagggggtgaagttgaacttttccttggaaatgcaggaacagcaatgcgtccattgacagccgcagttgctgttgccggaggaaagtctagttatgtacttgatg

SEQ ID NO: 1058 - DNA, 200 bp, Chenopodium album
catcaagtacataactagactttcctccggcaacagcaactgcggctgtcaatggacgcattgctgttcctgcatttccaaggaaaagttcaacttcaccccctccctctttaccagcaggaaatagaccaccacaaccctccacaattgcccttttggctgtcttatcatcctctacatttagcccaagagttcttaaa

SEQ ID NO: 1059 - DNA, 200 bp, Chenopodium album
ggaaagtctagttatgtacttgatggagtgccaagaatgagggagcgacccattggggatttggtagctggtctgaagcaacttggtgctgatgttgactgttttcttggcacggattgtcctcctgtccgggttaatgctaatgggggccttccagggggaaaggtcaagctctcaggatcagttagtagccaatattt

SEQ ID NO: 1060 - DNA, 200 bp, Chenopodium album
aaatattggctactaactgatcctgagagcttgacctttccccctggaaggcccccattagcattaacccggacaggaggacaatccgtgccaagaaaacagtcaacatcagcaccaagttgcttcagaccagctaccaaatccccaatgggtcgctccctcattcttggcactccatcaagtacataactagactttcc

SEQ ID NO: 1061 - DNA, 200 bp, Chenopodium album
caggatcagttagtagccaatatttgactgcgctgctcatggcaacacctttaggtcttggagacgttgaagttgaaatcattgataaattgatttctgtaccttatgtggagatgacaataaagttgatggaacgttttggtgtgtcagtagagcatagtgctaactgggataggttcttgatccgaggtggtcagaag

SEQ ID NO: 1062 - DNA, 200 bp, Chenopodium album
cttctgaccacctcggatcaagaacctatcccagttagcactatgctctactgacacaccaaaacgttccatcaactttattgtcatctccacataaggtacagaaatcaatttatcaatgatttcaacttcaacgtctccaagacctaaaggtgttgccatgagcagcgcagtcaaatattggctactaactgatcctg

SEQ ID NO: 1063 - DNA, 200 bp, Chenopodium album
gttcttgatccgaggtggtcagaagtacaaatctcctggaaatgcatatgtcgagggtgatgcttcaagtgctagttacttcctagcaggggctgcagtcactggtggaactgtgactgttgagggttgtggaacaagcagtttacagggtgatgtaaaatttgccgaagttcttgagaaaatgggttgcaaggttacct

SEQ ID NO: 1064 - DNA, 200 bp, Chenopodium album
aggtaaccttgcaacccattttctcaagaacttcggcaaattttacatcaccctgtaaactgcttgttccacaaccctcaacagtcacagttccaccagtgactgcagcccctgctaggaagtaactagcacttgaagcatcaccctcgacatatgcatttccaggagatttgtacttctgaccacctcggatcaagaac

SEQ ID NO: 1065 - DNA, 200 bp, Chenopodium album
gagaaaatgggttgcaaggttacctggacagagaacagtgtcactgtaactggaccgcccagggattcatctggaagaaaacacttgcgcgccgttgatgtcaacatgaacaaaatgccagatgtcgctatgactcttgctgttgttgccctttatgcagatgggcccactgccatcagagacgttgctagctggagagt

SEQ ID NO: 1066 - DNA, 200 bp, Chenopodium album
actctccagctagcaacgtctctgatggcagtgggcccatctgcataaagggcaacaacagcaagagtcatagcgacatctggcattttgttcatgttgacatcaacggcgcgcaagtgttttcttccagatgaatccctgggcggtccagttacagtgacactgttctctgtccaggtaaccttgcaacccattttctc

SEQ ID NO: 1067 - DNA, 200 bp, Chenopodium album
tcagagacgttgctagctggagagtgaaggaaacagaacggatgattgccatttgcacagaactcagaaagcttggggcaaccgttgaggaaggacctgattactgtgtgatcactccacctgagaaactaaacgtgacagccattgacacatatgatgatcaccgaatggccatggcattctctcttgctgcctgtgct

SEQ ID NO: 1068 - DNA, 200 bp, Chenopodium album
agcacaggcagcaagagagaatgccatggccattcggtgatcatcatatgtgtcaatggctgtcacgtttagtttctcaggtggagtgatcacacagtaatcaggtccttcctcaacggttgccccaagctttctgagttctgtgcaaatggcaatcatccgttctgtttccttcactctccagctagcaacgtctctga

SEQ ID NO: 1069 - DNA, 200 bp, Chenopodium album
ggcattctctcttgctgcctgtgctgatgttcctgtcaccatcaacgacccagggtgcactcgcaaaaccttcccagactactttgacgttttggaaaggtttgccaagcactgagttgccatctattggttatctagagcatacaaatttgaatcaagattaaaatgctttcagcttcagctttcgccgcattctttgt

SEQ ID NO: 1070 - DNA, 200 bp, Chenopodium album
acaaagaatgcggcgaaagctgaagctgaaagcattttaatcttgattcaaatttgtatgctctagataaccaatagatggcaactcagtgcttggcaaacctttccaaaacgtcaaagtagtctgggaaggttttgcgagtgcaccctgggtcgttgatggtgacaggaacatcagcacaggcagcaagagagaatgcc

SEQ ID NO: 1071 - DNA, 200 bp, Chenopodium album
cttcagctttcgccgcattctttgtatcatgtttgtaagattttagtttatacagtgtattaattttgtatcaggccagttagaaataatattcttgaaaagatgaactatgagaatgtgatttagaaactagtattggggtctgaactctacagcaataactgcagagttttgacaccatattttggtaatgtgagttc

SEQ ID NO: 1072 - DNA, 200 bp, Chenopodium album
gaactcacattaccaaaatatggtgtcaaaactctgcagttattgctgtagagttcagaccccaatactagtttctaaatcacattctcatagttcatcttttcaagaatattatttctaactggcctgatacaaaattaatacactgtataaactaaaatcttacaaacatgatacaaagaatgcggcgaaagctgaag

SEQ ID NO: 1073 - DNA, 200 bp, Commelina diffusa
atatattaagcgaagacgtttttgatacttcttatcgcgccgcctaagcgcaacttcatcaatcaaatatatatattattaaactcaattcctaatatatctctaaatcctatttgtgtatttctagttgcggagttgtatttgtacactgagtttgcagtatacttttgtattttccatctctgacttctaatcggaga

SEQ ID NO: 1074 - DNA, 200 bp, Commelina diffusa
tctccgattagaagtcagagatggaaaatacaaaagtatactgcaaactcagtgtacaaatacaactccgcaactagaaatacacaaataggatttagagatatattaggaattgagtttaataatatatatatttgattgatgaagttgcgcttaggcggcgcgataagaagtatcaaaaacgtcttcgcttaatatat

SEQ ID NO: 1075 - DNA, 200 bp, Commelina diffusa
tccatctctgacttctaatcggagactgagtggtcagctaggaagtaatcatcatcaattacaaatatcacatgcaatgttttttgaaaaaattcttgacaaacattttcttttagggggttaataatctgtaaaatctcatagataactcttcggtgttgttttataatatgatgatactcaaggtggtcataatctga

SEQ ID NO: 1076 - DNA, 200 bp, Commelina diffusa
tcagattatgaccaccttgagtatcatcatattataaaacaacaccgaagagttatctatgagattttacagattattaaccccctaaaagaaaatgtttgtcaagaattttttcaaaaaacattgcatgtgatatttgtaattgatgatgattacttcctagctgaccactcagtctccgattagaagtcagagatgga

SEQ ID NO: 1077 - DNA, 200 bp, Commelina diffusa
gatactcaaggtggtcataatctgaggtgctaagtaggatcggcaaagggtccagagaattgaaatcatggagctagataaggatcgtaaaattctacaaaaataataaaatatagtataaataaattataaagaatattttatatgtaaaaataatgtaaatatgtacacaatattttttgtaaatttatatataagca

SEQ ID NO: 1078 - DNA, 200 bp, Commelina diffusa
tgcttatatataaatttacaaaaaatattgtgtacatatttacattatttttacatataaaatattctttataatttatttatactatattttattatttttgtagaattttacgatccttatctagctccatgatttcaattctctggaccctttgccgatcctacttagcacctcagattatgaccaccttgagtatc

SEQ ID NO: 1079 - DNA, 200 bp, Commelina diffusa
ttttttgtaaatttatatataagcaatttcaacataaggattaatatttacatgacaaaattatcgaatttaataatataacacaataaaagtaaaattgtgagtccttaattaattaacttaagcattcttataaatgtagatactttgttttgaaatttatgttgtttaaattatctaatataatagatattttcaaa

SEQ ID NO: 1080 - DNA, 200 bp, Commelina diffusa
tttgaaaatatctattatattagataatttaaacaacataaatttcaaaacaaagtatctacatttataagaatgcttaagttaattaattaaggactcacaattttacttttattgtgttatattattaaattcgataattttgtcatgtaaatattaatccttatgttgaaattgcttatatataaatttacaaaaaa

SEQ ID NO: 1081 - DNA, 200 bp, Commelina diffusa
atctaatataatagatattttcaaaataatttttgttcatgtcatgcatataaatatttttatattttttaaaaaaagaattcatgcacaaaatagtctaataaattattattttcaatattatggtgagcatattttcttttgagttattgtggatttgtggtgagcaaattattattaattagtttcaaattttaaaa

SEQ ID NO: 1082 - DNA, 200 bp, Commelina diffusa
ttttaaaatttgaaactaattaataataatttgctcaccacaaatccacaataactcaaaagaaaatatgctcaccataatattgaaaataataatttattagactattttgtgcatgaattctttttttaaaaaatataaaaatatttatatgcatgacatgaacaaaaattattttgaaaatatctattatattagat

SEQ ID NO: 1083 - DNA, 200 bp, Commelina diffusa
tattaattagtttcaaattttaaaatataatatgtatatgacatctattgcaactaaacatgattttataaattaatacaaataattttaggttaattattattgacatcttaataatttaatatattgttaaaataatttaattttataatatatatttttaatattgtgaaaaagtttttgtcatctctttttgaatt

SEQ ID NO: 1084 - DNA, 200 bp, Commelina diffusa
aattcaaaaagagatgacaaaaactttttcacaatattaaaaatatatattataaaattaaattattttaacaatatattaaattattaagatgtcaataataattaacctaaaattatttgtattaatttataaaatcatgtttagttgcaatagatgtcatatacatattatattttaaaatttgaaactaattaata

SEQ ID NO: 1085 - DNA, 200 bp, Commelina diffusa
agtttttgtcatctctttttgaattatagattttttaattacatatatacatttttaattatctatcagtatatacgcaataaatatcgatatatttattttcatatctataaaatgcatatcataattatttatagcaaaaatgattttaaaaatgaatatacaattatcctataaatattttagaaatttttagcaca

SEQ ID NO: 1086 - DNA, 200 bp, Commelina diffusa
tgtgctaaaaatttctaaaatatttataggataattgtatattcatttttaaaatcatttttgctataaataattatgatatgcattttatagatatgaaaataaatatatcgatatttattgcgtatatactgatagataattaaaaatgtatatatgtaattaaaaaatctataattcaaaaagagatgacaaaaact

SEQ ID NO: 1087 - DNA, 200 bp, Commelina diffusa
aaatattttagaaatttttagcacacaataatatatttaataaaatttatcatcatatattaaataaaataattactatattatatgaaaatgcaaataataatatttaaaaatctctcatgtaataggaaaataatatctattatgttaatcgaaatttagacagtgaagtatatctaaccatttataatggtaattta

SEQ ID NO: 1088 - DNA, 200 bp, Commelina diffusa
taaattaccattataaatggttagatatacttcactgtctaaatttcgattaacataatagatattattttcctattacatgagagatttttaaatattattatttgcattttcatataatatagtaattattttatttaatatatgatgataaattttattaaatatattattgtgtgctaaaaatttctaaaatattt

SEQ ID NO: 1089 - DNA, 200 bp, Commelina diffusa
tctaaccatttataatggtaatttacttagttatatgattatatagttttttaatactaagaaacgtatataaaaccctatgaagcataaacatgatttgaatcgatggggtccccccatcttgtttgtttgtttttttttttccaatcattgtttttatatcctaatattcttgatttttttttttccaaatatactct

SEQ ID NO: 1090 - DNA, 200 bp, Commelina diffusa
agagtatatttggaaaaaaaaaaatcaagaatattaggatataaaaacaatgattggaaaaaaaaaaacaaacaaacaagatggggggaccccatcgattcaaatcatgtttatgcttcatagggttttatatacgtttcttagtattaaaaaactatataatcatataactaagtaaattaccattataaatggttaga

SEQ ID NO: 1091 - DNA, 200 bp, Commelina diffusa
atttttttttttccaaatatactctattagtttttccatccaaaatgctgtcatcacattattttattaatattttatcaataaaatattgatataaataaatgaaataaaaacactttattttttatttattaaaataatcatttaaattgtttcttactaaaaccaaataattcttataaagtatacatgataaaaag

SEQ ID NO: 1092 - DNA, 200 bp, Commelina diffusa
ctttttatcatgtatactttataagaattatttggttttagtaagaaacaatttaaatgattattttaataaataaaaaataaagtgtttttatttcatttatttatatcaatattttattgataaaatattaataaaataatgtgatgacagcattttggatggaaaaactaatagagtatatttggaaaaaaaaaaat

SEQ ID NO: 1093 - DNA, 200 bp, Commelina diffusa
cttataaagtatacatgataaaaagaactaaagtataaatatttaaaaataaaaatataaaagatatttgaagttgtatatgtatcacaattgtataaatattttatgaaattatattttaaaaccaatattttaatataataatattttattaaaaaatacaataattttataagcataataataataataatattttt

SEQ ID NO: 1094 - DNA, 200 bp, Commelina diffusa
aaaaatattattattattattatgcttataaaattattgtattttttaataaaatattattatattaaaatattggttttaaaatataatttcataaaatatttatacaattgtgatacatatacaacttcaaatatcttttatatttttatttttaaatatttatactttagttctttttatcatgtatactttataag

SEQ ID NO: 1095 - DNA, 200 bp, Commelina diffusa
gcataataataataataatatttttttttttcttcacatttctctattcattgtaataatgtataattaatatattgtttttagatgatactatgggttggtattattttaattttaattttttttttgaataaaactaggtgcatctagtgtgttatttcattcaaaaatatgtaatcatgattacactaatcttgaag

SEQ ID NO: 1096 - DNA, 200 bp, Commelina diffusa
cttcaagattagtgtaatcatgattacatatttttgaatgaaataacacactagatgcacctagttttattcaaaaaaaaaattaaaattaaaataataccaacccatagtatcatctaaaaacaatatattaattatacattattacaatgaatagagaaatgtgaagaaaaaaaaaaatattattattattattatgc

SEQ ID NO: 1097 - DNA, 200 bp, Commelina diffusa
aatcatgattacactaatcttgaagactatctcgtgaagagagaaccccacatgataatcccccaaaagaaaattatatacaaaaatgtgtaataaaaaatatgttattttaaattttttgaaaaaggaaaagtataattaacttaatatgcaaaataatttttgtatacaatagatggttattatcgtttaaatacata

SEQ ID NO: 1098 - DNA, 200 bp, Commelina diffusa
tatgtatttaaacgataataaccatctattgtatacaaaaattattttgcatattaagttaattatacttttcctttttcaaaaaatttaaaataacatattttttattacacatttttgtatataattttcttttgggggattatcatgtggggttctctcttcacgagatagtcttcaagattagtgtaatcatgatt

SEQ ID NO: 1099 - DNA, 200 bp, Commelina diffusa
atggttattatcgtttaaatacatatggagtataatgtccatgtgaagcatgggccatgtgctagtttgctaaaaatataaatattttgctttagttttaactatttaattcattttatttattacattactatttaaattgtattattgttttaaattaattgaacatcgtataacttttttgagttcaagaaaattat

SEQ ID NO: 1100 - DNA, 200 bp, Commelina diffusa
ataattttcttgaactcaaaaaagttatacgatgttcaattaatttaaaacaataatacaatttaaatagtaatgtaataaataaaatgaattaaatagttaaaactaaagcaaaatatttatatttttagcaaactagcacatggcccatgcttcacatggacattatactccatatgtatttaaacgataataaccat

SEQ ID NO: 1101 - DNA, 200 bp, Commelina diffusa
acttttttgagttcaagaaaattataaagaacaacttaaaaacacaattttttaaattaatcttttataataagaccattttaaatttatactattatgtaaaatagaggattccctaaatttaatatattatttatttaataaataatttacatagaaacttataaatagaccttaaaatttatttattatatatatat

SEQ ID NO: 1102 - DNA, 200 bp, Commelina diffusa
atatatatataataaataaattttaaggtctatttataagtttctatgtaaattatttattaaataaataatatattaaatttagggaatcctctattttacataatagtataaatttaaaatggtcttattataaaagattaatttaaaaaattgtgtttttaagttgttctttataattttcttgaactcaaaaaagt

SEQ ID NO: 1103 - DNA, 200 bp, Commelina diffusa
taaaatttatttattatatatatatgtatatatataatcagttcctatgattcctaaaaatttattacattcaacagtattatatttttgatattttttttatttttcctagatcaaaagtatatttttttaacttacataaattttcttaagatagtttccctttatttgaatcctaataaaatattttttctgattaa

SEQ ID NO: 1104 - DNA, 200 bp, Commelina diffusa
ttaatcagaaaaaatattttattaggattcaaataaagggaaactatcttaagaaaatttatgtaagttaaaaaaatatacttttgatctaggaaaaataaaaaaaatatcaaaaatataatactgttgaatgtaataaatttttaggaatcataggaactgattatatatatacatatatatataataaataaatttta

SEQ ID NO: 1105 - DNA, 200 bp, Commelina diffusa
ctaataaaatattttttctgattaatttattaataaagatgattaaaaatatttgattatgatccttttttttccttgatcaaaagtatggtttttttttttttttaactatagaattttaagataattttcctttatttgaatcctgatataatttttctaattaatttattaataaatatgattaaaaatatttgatt

SEQ ID NO: 1106 - DNA, 200 bp, Commelina diffusa
aatcaaatatttttaatcatatttattaataaattaattagaaaaattatatcaggattcaaataaaggaaaattatcttaaaattctatagttaaaaaaaaaaaaaaaccatacttttgatcaaggaaaaaaaaggatcataatcaaatatttttaatcatctttattaataaattaatcagaaaaaatattttattag

SEQ ID NO: 1107 - DNA, 200 bp, Commelina diffusa
ttaaatgtatttttattcttttattgttgaataagagttataactttattgaacaacttatatgatttcaaaagtatacatattattcaaccttttgggattcacatgcccaatctcccatgctattttgcgatgtaaatatttgccgcttaaggtacgcatttttgtttgacttctctccacaacacatattgctacga

SEQ ID NO: 1108 - DNA, 200 bp, Commelina diffusa
tcgtagcaatatgtgttgtggagagaagtcaaacaaaaatgcgtaccttaagcggcaaatatttacatcgcaaaatagcatgggagattgggcatgtgaatcccaaaaggttgaataatatgtatacttttgaaatcatataagttgttcaataaagttataactcttattcaacaataaaagaataaaaatacatttaa

SEQ ID NO: 1109 - DNA, 200 bp, Commelina diffusa
ctctccacaacacatattgctacgagggatcaacttagaatagacatgcatgttgactcacactatgcattctgcggagccgataattcggcggatcatcttttcctcttgtatcctatcggaagcttgttttgatttacatgttactcctattcgtgctcgaccacaattcaagaggtgtggattagtggacgtcggtg

SEQ ID NO: 1110 - DNA, 200 bp, Commelina diffusa
caccgacgtccactaatccacacctcttgaattgtggtcgagcacgaataggagtaacatgtaaatcaaaacaagcttccgataggatacaagaggaaaagatgatccgccgaattatcggctccgcagaatgcatagtgtgagtcaacatgcatgtctattctaagttgatccctcgtagcaatatgtgttgtggagag

SEQ ID NO: 1111 - DNA, 200 bp, Commelina diffusa
aggtgtggattagtggacgtcggtgtcaacgtgtcgcctggtcggcattctgctggactctttggaaggcacggaaccgcctcatctttgaccgttatcctcctaagttgcgagctattcagtgggtggttcactatctttttgtggattggacgttgaccatttactgttttaggttggtcttgctttgttcgctctgt

SEQ ID NO: 1112 - DNA, 200 bp, Commelina diffusa
acagagcgaacaaagcaagaccaacctaaaacagtaaatggtcaacgtccaatccacaaaaagatagtgaaccacccactgaatagctcgcaacttaggaggataacggtcaaagatgaggcggttccgtgccttccaaagagtccagcagaatgccgaccaggcgacacgttgacaccgacgtccactaatccacacct

SEQ ID NO: 1113 - DNA, 200 bp, Commelina diffusa
gttggtcttgctttgttcgctctgtagataattattctgctttctttttagagcctgtgcaccaaacctctttttgcaatgaaatgctaggtctcctagttttcaaaaaaaaaaagtatatatattttaaataaaattaaataaaaatattttcttgacattaaaatattaatttttaatagtaatataatgtgatagat

SEQ ID NO: 1114 - DNA, 200 bp, Commelina diffusa
atctatcacattatattactattaaaaattaatattttaatgtcaagaaaatatttttatttaattttatttaaaatatatatactttttttttttgaaaactaggagacctagcatttcattgcaaaaagaggtttggtgcacaggctctaaaaagaaagcagaataattatctacagagcgaacaaagcaagaccaac

SEQ ID NO: 1115 - DNA, 200 bp, Commelina diffusa
ttaatagtaatataatgtgatagatttataaaaatgttttaaatttactaaatagagaaacttgttaaatatttttgggtcataaaaatttaaaataaaataattataaaaacataattatgttaaattgtttttttaaatattattatattaaatacgatatataataatgtcataaagttataccatcacatatacac

SEQ ID NO: 1116 - DNA, 200 bp, Commelina diffusa
gtgtatatgtgatggtataactttatgacattattatatatcgtatttaatataataatatttaaaaaaacaatttaacataattatgtttttataattattttattttaaatttttatgacccaaaaatatttaacaagtttctctatttagtaaatttaaaacatttttataaatctatcacattatattactattaa

SEQ ID NO: 1117 - DNA, 200 bp, Commelina diffusa
taaagttataccatcacatatacactaatatttcaataaaaaaatatgtgtatgatttttttttccttcataatttcttttacagtgatatttttaataaaagtaattaaataacaagtttgagaggtatgatgagctcctgagacaatattatattttctatattttcaatttgtatatatatgtttttattttatttt

SEQ ID NO: 1118 - DNA, 200 bp, Commelina diffusa
aaaataaaataaaaacatatatatacaaattgaaaatatagaaaatataatattgtctcaggagctcatcatacctctcaaacttgttatttaattacttttattaaaaatatcactgtaaaagaaattatgaaggaaaaaaaaatcatacacatatttttttattgaaatattagtgtatatgtgatggtataacttta

SEQ ID NO: 1119 - DNA, 200 bp, Commelina diffusa
tatatatatgtttttattttatttttttgaaattataaacatagaatcttattatttttaatcattcaataaattctaagtggtttatatttagttcactttttacttatcatattattgttaggttgctttctttctttatgatagcaatttttttaattttttttttatattaatggtaagatatgttaaaattaaca

SEQ ID NO: 1120 - DNA, 200 bp, Commelina diffusa
tgttaattttaacatatcttaccattaatataaaaaaaaaattaaaaaaattgctatcataaagaaagaaagcaacctaacaataatatgataagtaaaaagtgaactaaatataaaccacttagaatttattgaatgattaaaaataataagattctatgtttataatttcaaaaaaataaaataaaaacatatatata

SEQ ID NO: 1121 - DNA, 200 bp, Commelina diffusa
atggtaagatatgttaaaattaacacttcatatatatataatatatatattagaaaaaattaacacttcatattgactcttcatgtgttgattgattactatccaatacttgcaatcttaacgctattgttaaaaatcgtaacggaactatgaagctttgaaccaaactacctcctcagagaaagattgatacaattccg

SEQ ID NO: 1122 - DNA, 200 bp, Commelina diffusa
cggaattgtatcaatctttctctgaggaggtagtttggttcaaagcttcatagttccgttacgatttttaacaatagcgttaagattgcaagtattggatagtaatcaatcaacacatgaagagtcaatatgaagtgttaattttttctaatatatatattatatatatatgaagtgttaattttaacatatcttaccat

SEQ ID NO: 1123 - DNA, 200 bp, Commelina diffusa
tcagagaaagattgatacaattccggtggtttacttttttattaaattataacattgtaagatgacttgctaattacatacattacatacaattataacataaatatagtgaataataatagaaactaaataaccaactaggtaatagcctagttgggatttcgtctccaaaagagatggaggggccaggttttgagcca

SEQ ID NO: 1124 - DNA, 200 bp, Commelina diffusa
tggctcaaaacctggcccctccatctcttttggagacgaaatcccaactaggctattacctagttggttatttagtttctattattattcactatatttatgttataattgtatgtaatgtatgtaattagcaagtcatcttacaatgttataatttaataaaaaagtaaaccaccggaattgtatcaatctttctctga

SEQ ID NO: 1125 - DNA, 200 bp, Commelina diffusa
gatggaggggccaggttttgagccatggtgactgcgcttgtcgcaaattttccaaagaaaaagagcataaatgccatagaattatgacataaactacaatttttaataattcgaacaacagtacttaataatatgccataatattatgacacaaattacagcaattaataattcgaacaactacaaactgcagtacttaa

SEQ ID NO: 1126 - DNA, 200 bp, Commelina diffusa
ttaagtactgcagtttgtagttgttcgaattattaattgctgtaatttgtgtcataatattatggcatattattaagtactgttgttcgaattattaaaaattgtagtttatgtcataattctatggcatttatgctctttttctttggaaaatttgcgacaagcgcagtcaccatggctcaaaacctggcccctccatc

SEQ ID NO: 1127 - DNA, 200 bp, Commelina diffusa
aacaactacaaactgcagtacttaataattcgaataaccacaatacttaataattcgaacaaaacaacataattatattaatgcatcacgtgtttgcatgaaattatgacatcatatatatatacactaattcttaaccttacaatttttattttttttttgaattatgacataaactattatatacactaattcttaac

SEQ ID NO: 1128 - DNA, 200 bp, Commelina diffusa
gttaagaattagtgtatataatagtttatgtcataattcaaaaaaaaaataaaaattgtaaggttaagaattagtgtatatatatatgatgtcataatttcatgcaaacacgtgatgcattaatataattatgttgttttgttcgaattattaagtattgtggttattcgaattattaagtactgcagtttgtagttgtt

SEQ ID NO: 1129 - DNA, 200 bp, Commelina diffusa
actattatatacactaattcttaaccttaaaaaaaaactatgacaacatgtatatatatatgctaattcttaaccttacaaaaataaataaatcttgaattatgacataaactatagtacttaataatttgaacaaaacaacataattacattaatacatcacatgcttgcatgcaattatgacatatatatatacatac

SEQ ID NO: 1130 - DNA, 200 bp, Commelina diffusa
gtatgtatatatatatgtcataattgcatgcaagcatgtgatgtattaatgtaattatgttgttttgttcaaattattaagtactatagtttatgtcataattcaagatttatttatttttgtaaggttaagaattagcatatatatatacatgttgtcatagtttttttttaaggttaagaattagtgtatataatagt

SEQ ID NO: 1131 - DNA, 200 bp, Commelina diffusa
aattatgacatatatatatacatacacacacaaacacactaattcttaaccttaaaaaaaataaaaaatcttgatctattgaaagcaacaaaatagcatattaactttggtatagtacacaaaattatgacataaaatattaactttgctgtaaggcttttaaaaaataacttctctatcccaatttaataataatgata

SEQ ID NO: 1132 - DNA, 200 bp, Commelina diffusa
tatcattattattaaattgggatagagaagttattttttaaaagccttacagcaaagttaatattttatgtcataattttgtgtactataccaaagttaatatgctattttgttgctttcaatagatcaagattttttattttttttaaggttaagaattagtgtgtttgtgtgtgtatgtatatatatatgtcataatt

SEQ ID NO: 1133 - DNA, 200 bp, Commelina diffusa
ctatcccaatttaataataatgataatgataatgataatgataataataataataataataatagtaggagcagcagcaggattagatctagattcttttatgacttcaccatacagtgattttacattatgaataataggatttgattctcttaacttaataataatattaataagaattagatctagattcttttatg

SEQ ID NO: 1134 - DNA, 200 bp, Commelina diffusa
cataaaagaatctagatctaattcttattaatattattattaagttaagagaatcaaatcctattattcataatgtaaaatcactgtatggtgaagtcataaaagaatctagatctaatcctgctgctgctcctactattattattattattattattatcattatcattatcattatcattattattaaattgggatag

SEQ ID NO: 1135 - DNA, 200 bp, Commelina diffusa
agaattagatctagattcttttatgacttcaccgtacagtgatttgattttacattatgaataataggattagattctcttaactataataataataataatatatttggtaatgcgactttatagaaaggacccgaatttaattcggagttccgtatagttaaactgtgtctctcactaatagtaaatatatatatatt

SEQ ID NO: 1136 - DNA, 200 bp, Commelina diffusa
aatatatatatatttactattagtgagagacacagtttaactatacggaactccgaattaaattcgggtcctttctataaagtcgcattaccaaatatattattattattattatagttaagagaatctaatcctattattcataatgtaaaatcaaatcactgtacggtgaagtcataaaagaatctagatctaattct

SEQ ID NO: 1137 - DNA, 200 bp, Commelina diffusa
cactaatagtaaatatatatatatttgcattctcactggtctctcaaacatcaatggccaaaacccaacacttccactcatcctcgccggcggcgatggccggagcatcccctgaggtcgttctccagcccattcggcagatatccgggacggcgaagctccccggatcgaagtctctgtcgcagaggatactgctcctt

SEQ ID NO: 1138 - DNA, 200 bp, Commelina diffusa
aaggagcagtatcctctgcgacagagacttcgatccggggagcttcgccgtcccggatatctgccgaatgggctggagaacgacctcaggggatgctccggccatcgccgccggcgaggatgagtggaagtgttgggttttggccattgatgtttgagagaccagtgagaatgcaaatatatatatatttactattagtg

SEQ ID NO: 1139 - DNA, 200 bp, Commelina diffusa
tctgtcgcagaggatactgctccttgctgcgctctctgaggtgaggattgttcgttttatggtaaaaatgaattcttagtagttttgctaatgtaattgagctgcattgatatgaatgcatatacttggtaacctagtgttagttttccaagaatgttggagatagtttgactttttttttaatacagaaattttattat

SEQ ID NO: 1140 - DNA, 200 bp, Commelina diffusa
ataataaaatttctgtattaaaaaaaaagtcaaactatctccaacattcttggaaaactaacactaggttaccaagtatatgcattcatatcaatgcagctcaattacattagcaaaactactaagaattcatttttaccataaaacgaacaatcctcacctcagagagcgcagcaaggagcagtatcctctgcgacaga

SEQ ID NO: 1141 - DNA, 200 bp, Commelina diffusa
cccaaatcaaaatggccgccaaaaccctagctctctcgccgtcgtcgccggcggcgatcgccggagctcgccggagctcaccagcgccgccgccggcgctggtacggctcggatccggcccaaaggcggcgcctttgggcgctctgagggtctttgggcggcggccggcggcgctgcgggtcgcggcggcggcggcggtg

SEQ ID NO: 1142 - DNA, 200 bp, Commelina diffusa
caccgccgccgccgccgcgacccgcagcgccgccggccgccgcccaaagaccctcagagcgcccaaaggcgccgcctttgggccggatccgagccgtaccagcgccggcggcggcgctggtgagctccggcgagctccggcgatcgccgccggcgacgacggcgagagagctagggttttggcggccattttgatttggg

SEQ ID NO: 1143 - DNA, 200 bp, Commelina diffusa
gcgggtcgcggcggcggcggcggtgaagacggcggcggcggcggaggaggagatagttttggagccgattcgggaggtttcgggggttgtgaagttgcccggatcgaagtcgctgtcgaaccggattttgctgctcgcggcgctggccgagggaacaaccgtagtggacaacttgttgaacagtgacgatgtccgctaca

SEQ ID NO: 1144 - DNA, 200 bp, Commelina diffusa
tgtagcggacatcgtcactgttcaacaagttgtccactacggttgttccctcggccagcgccgcgagcagcaaaatccggttcgacagcgacttcgatccgggcaacttcacaacccccgaaacctcccgaatcggctccaaaactatctcctcctccgccgccgccgccgtcttcaccgccgccgccgccgcgacccgc

SEQ ID NO: 1145 - DNA, 200 bp, Commelina diffusa
ttgaacagtgacgatgtccgctacatgcttgctgctctgaggaccctgggactatccgtggaggatgatgttgcaaccaaaagagcggttgttgagggatctggtggccacttcccagtcggtaacgaatcaaaagaagttgagctgttcttaggaaatgcgggaactgcaatgcgaccactaactgctgctgttacagc

SEQ ID NO: 1146 - DNA, 200 bp, Commelina diffusa
gctgtaacagcagcagttagtggtcgcattgcagttcccgcatttcctaagaacagctcaacttcttttgattcgttaccgactgggaagtggccaccagatccctcaacaaccgctcttttggttgcaacatcatcctccacggatagtcccagggtcctcagagcagcaagcatgtagcggacatcgtcactgttcaa

SEQ ID NO: 1147 - DNA, 200 bp, Commelina diffusa
gaccactaactgctgctgttacagcagctggtggaaatgcaagctacatacttgacggggtgccaaggatgagggaaagacccatcggagatttggttgatggcttgaagcagcttggtgctgatgctgattgtttccttggaaccaactgcccacccgttcgtgtaaatgcaaagggaggtcttcccggtggaaaggtg

SEQ ID NO: 1148 - DNA, 200 bp, Commelina diffusa
cacctttccaccgggaagacctccctttgcatttacacgaacgggtgggcagttggttccaaggaaacaatcagcatcagcaccaagctgcttcaagccatcaaccaaatctccgatgggtctttccctcatccttggcaccccgtcaagtatgtagcttgcatttccaccagctgctgtaacagcagcagttagtggtc

SEQ ID NO: 1149 - DNA, 200 bp, Commelina diffusa
gggaggtcttcccggtggaaaggtgaaactctctggatcgattagcagccagtacttaactgctttgctcatggcagctcctttagcccttggagatgttgagattgagatcatcgacaagctcatatcggtcccctatgttgagatgactctgaaattgatggaacgttttggcgttaaggtagagcattctgaaagct

SEQ ID NO: 1150 - DNA, 200 bp, Commelina diffusa
agctttcagaatgctctaccttaacgccaaaacgttccatcaatttcagagtcatctcaacataggggaccgatatgagcttgtcgatgatctcaatctcaacatctccaagggctaaaggagctgccatgagcaaagcagttaagtactggctgctaatcgatccagagagtttcacctttccaccgggaagacctccc

SEQ ID NO: 1151 - DNA, 200 bp, Commelina diffusa
gttaaggtagagcattctgaaagctgggacaggttcctcatcaagggtggtcagaaatacaagtctccaggtaaagcttatgtcgaaggtgatgcatcgagcgctagttacttcttggccggtgctgcagtcactggtggcactgtcaccgttgaaggttgtggtacgaccagtctgcagggtgatgtgaactttgctgc

SEQ ID NO: 1152 - DNA, 200 bp, Commelina diffusa
gcagcaaagttcacatcaccctgcagactggtcgtaccacaaccttcaacggtgacagtgccaccagtgactgcagcaccggccaagaagtaactagcgctcgatgcatcaccttcgacataagctttacctggagacttgtatttctgaccacccttgatgaggaacctgtcccagctttcagaatgctctaccttaac

SEQ ID NO: 1153 - DNA, 200 bp, Commelina diffusa
tgcagggtgatgtgaactttgctgcagttcttgagaaaatgggtgcaaaagttacatggactgagaacagcgttacagttactggtccaccacgcgatccttcgaagagaacaaacttgcacggaattgatgttaatatgaataaaatgccagacgtcgctatgacacttgcggttgttgcactgtttgctgacggccct

SEQ ID NO: 1154 - DNA, 200 bp, Commelina diffusa
agggccgtcagcaaacagtgcaacaaccgcaagtgtcatagcgacgtctggcattttattcatattaacatcaattccgtgcaagtttgttctcttcgaaggatcgcgtggtggaccagtaactgtaacgctgttctcagtccatgtaacttttgcacccattttctcaagaactgcagcaaagttcacatcaccctgca

SEQ ID NO: 1155 - DNA, 200 bp, Commelina diffusa
gatctctggtactgttcaattgcctgggtcaaagtctttatccaatcgaatccttcttttagctgctttgtctgaggtatttatttctcaactgcgaaaacaatctctatttgatattggaatttatattacatactccatcttgttgtaattgcattagtacatacttatgttttgacctttgttcgtttgtttgttga

SEQ ID NO: 1156 - DNA, 200 bp, Commelina diffusa
tcaacaaacaaacgaacaaaggtcaaaacataagtatgtactaatgcaattacaacaagatggagtatgtaatataaattccaatatcaaatagagattgttttcgcagttgagaaataaatacctcagacaaagcagctaaaagaaggattcgattggataaagactttgacccaggcaattgaacagtaccagagatc

SEQ ID NO: 1157 - DNA, 200 bp, Commelina diffusa
tgacctttgttcgtttgtttgttgaattggtagtgttgagaatttgaatctaattatttgtttttccatgtgaatttaatctgattaaatccacttcttatttatgttaagttgcaatgatgtttgccaaacggttatcattgaaggataagttcgcctacttttgaccctcccaacttcgcgttggtagagccatttta

SEQ ID NO: 1158 - DNA, 200 bp, Commelina diffusa
taaaatggctctaccaacgcgaagttgggagggtcaaaagtaggcgaacttatccttcaatgataaccgtttggcaaacatcattgcaacttaacataaataagaagtggatttaatcagattaaattcacatggaaaaacaaataattagattcaaattctcaacactaccaattcaacaaacaaacgaacaaaggtca

SEQ ID NO: 1159 - DNA, 127 bp, Commelina diffusa; identical to SEQ ID NO: 88

SEQ ID NO: 1160 - DNA, 127 bp, Commelina diffusa
tttttgtaattgatgatggataattaattacatggtaacttagctagtctccgagtacaaatatactacatacatactcagcgtacaagtacaactcttcaactatatatatacatcaaattaatca

SEQ ID NO: 1161 - DNA, 200 bp, Commelina diffusa
ttattattattattttcattgttccggctagttctagcccccccactgtccatcttcccgtctaccgccctcctacatcctctctcacccatttcagcccctcttccacacctgaccactcacagccgacggccatctaatcatacttagaggacatgttctaacaaaaagattaggcttccaccttttaatacgaaaaa

SEQ ID NO: 1162 - DNA, 200 bp, Commelina diffusa
tttttcgtattaaaaggtggaagcctaatctttttgttagaacatgtcctctaagtatgattagatggccgtcggctgtgagtggtcaggtgtggaagaggggctgaaatgggtgagagaggatgtaggagggcggtagacgggaagatggacagtgggggggctagaactagccggaacaatgaaaataataataataa

SEQ ID NO: 1163 - DNA, 200 bp, Commelina diffusa
ggcttccaccttttaatacgaaaaattaaagaaataattataaaattttaaatcactttcgaaacaacacaaaaaaaaaaaataaaaaaatgcaacatccttgataataaactcaaactagaaaaataaactaaaacaaaaccaaaatttcaaagttgttctataaaaaaaaaataaaaaaattccaagacttgcttctt

SEQ ID NO: 1164 - DNA, 200 bp, Commelina diffusa
aagaagcaagtcttggaatttttttattttttttttatagaacaactttgaaattttggttttgttttagtttatttttctagtttgagtttattatcaaggatgttgcatttttttattttttttttttgtgttgtttcgaaagtgatttaaaattttataattatttctttaatttttcgtattaaaaggtggaagcc

SEQ ID NO: 1165 - DNA, 200 bp, Commelina diffusa
aaaaaaattccaagacttgcttcttcggctcttttgtagtcgatcggtcttcaagacaagttagctgctatgctcgactcttggagaaatgttcattgcttgagcttgaacccacctcaaactcttcggataggcggtctcttctccctactcccactttgtcttcggttccgaggaagaatgccatcttttctacttcc

SEQ ID NO: 1166 - DNA, 200 bp, Commelina diffusa
ggaagtagaaaagatggcattcttcctcggaaccgaagacaaagtgggagtagggagaagagaccgcctatccgaagagtttgaggtgggttcaagctcaagcaatgaacatttctccaagagtcgagcatagcagctaacttgtcttgaagaccgatcgactacaaaagagccgaagaagcaagtcttggaattttttt

SEQ ID NO: 1167 - DNA, 200 bp, Commelina diffusa
gaagaatgccatcttttctacttcccccatctctttggttctctcagccactccctcggggctttctaggatgtctcgaggcagaacgagaaccatggtgtctaggtactcagtcgatgtttgacctctcggagctcgaagcacgaggaagtcgaaacgatgagagaaggtttgtttgtcaccgctcggcgtggcgcaac

SEQ ID NO: 1168 - DNA, 200 bp, Commelina diffusa
gttgcgccacgccgagcggtgacaaacaaaccttctctcatcgtttcgacttcctcgtgcttcgagctccgagaggtcaaacatcgactgagtacctagacaccatggttctcgttctgcctcgagacatcctagaaagccccgagggagtggctgagagaaccaaagagatgggggaagtagaaaagatggcattcttc

SEQ ID NO: 1169 - DNA, 200 bp, Commelina diffusa
ttgtcaccgctcggcgtggcgcaacgttatcgtaggtgattccgcgattcaggttaagcacagcctcgatccagctaatggatcagaataggggagtctcttcactgtagattttttttcttcttgagttgtttcactttgttcttatggtgggacccttcggggtcccatatacgtaggtgcgcaccgatgtttgtttg

SEQ ID NO: 1170 - DNA, 200 bp, Commelina diffusa
caaacaaacatcggtgcgcacctacgtatatgggaccccgaagggtcccaccataagaacaaagtgaaacaactcaagaagaaaaaaaatctacagtgaagagactcccctattctgatccattagctggatcgaggctgtgcttaacctgaatcgcggaatcacctacgataacgttgcgccacgccgagcggtgacaa

SEQ ID NO: 1171 - DNA, 200 bp, Commelina diffusa
gtaggtgcgcaccgatgtttgtttgtatggctgtggacgtccttatgtcaactttttcggcttcccttcttggatcccaaacacgagaggtgcaccgccactgcatatgtgcaccacactttttcattctactaatactaggtcgtatagttcgggttgaaaaaagaataaaataataagggtgttatacatatttttaa

SEQ ID NO: 1172 - DNA, 200 bp, Commelina diffusa
ttaaaaatatgtataacacccttattattttattcttttttcaacccgaactatacgacctagtattagtagaatgaaaaagtgtggtgcacatatgcagtggcggtgcacctctcgtgtttgggatccaagaagggaagccgaaaaagttgacataaggacgtccacagccatacaaacaaacatcggtgcgcacctac

SEQ ID NO: 1173 - DNA, 200 bp, Commelina diffusa
ataagggtgttatacatatttttaatgatcttagtaaagcttttggtttgatgatataaaatgtgttatttttgtttgaatatatgactacttcatacataacttttatgatgtcagtaggaattttgcattgattgtataaatgtgtcatcttgcttaaattaaacaaattcataactggttttatacatattttttat

SEQ ID NO: 1174 - DNA, 200 bp, Commelina diffusa
ataaaaaatatgtataaaaccagttatgaatttgtttaatttaagcaagatgacacatttatacaatcaatgcaaaattcctactgacatcataaaagttatgtatgaagtagtcatatattcaaacaaaaataacacattttatatcatcaaaccaaaagctttactaagatcattaaaaatatgtataacacccttat

SEQ ID NO: 1175 - DNA, 200 bp, Commelina diffusa
aactggttttatacatattttttatgatcttactaggacttctgcattgattgtataaaggtgttatttttgcttgaatttatgactatttttatacataacttttatgatcttagcctaaattttgcattgattgtataaaggtgttatctcgcttgaatttatgattggttggaattttgtgtatttgcattgtatat

SEQ ID NO: 1176 - DNA, 200 bp, Commelina diffusa
atatacaatgcaaatacacaaaattccaaccaatcataaattcaagcgagataacacctttatacaatcaatgcaaaatttaggctaagatcataaaagttatgtataaaaatagtcataaattcaagcaaaaataacacctttatacaatcaatgcagaagtcctagtaagatcataaaaaatatgtataaaaccagtt

SEQ ID NO: 1177 - DNA, 200 bp, Commelina diffusa
aattttgtgtatttgcattgtatattgattgtataaaggtggcatcttgcttgaattcatgagtagttttattcataacttttattatcttagtaggactaatgtattgattatataaaggaaggagtcattttacttgaatttagagaggagttttagttatgtgattgctgagaaatggaaatcatattgtttaatgg

SEQ ID NO: 1178 - DNA, 200 bp, Commelina diffusa
ccattaaacaatatgatttccatttctcagcaatcacataactaaaactcctctctaaattcaagtaaaatgactccttcctttatataatcaatacattagtcctactaagataataaaagttatgaataaaactactcatgaattcaagcaagatgccacctttatacaatcaatatacaatgcaaatacacaaaatt

SEQ ID NO: 1179 - DNA, 200 bp, Commelina diffusa
aaatggaaatcatattgtttaatggttggtaacttgaaccttgggagagtgactatgactactttagcattttacatatattataagattcaatgtttggtagcagaaagtatatgcttttgaaaagatctttcaggagccttgtatcacaattaacaactcaatctgctaaatctgaggataattggagtgttatactt

SEQ ID NO: 1180 - DNA, 200 bp, Commelina diffusa
aagtataacactccaattatcctcagatttagcagattgagttgttaattgtgatacaaggctcctgaaagatcttttcaaaagcatatactttctgctaccaaacattgaatcttataatatatgtaaaatgctaaagtagtcatagtcactctcccaaggttcaagttaccaaccattaaacaatatgatttccattt

SEQ ID NO: 1181 - DNA, 200 bp, Commelina diffusa
tgaggataattggagtgttatacttgtagaatgttagattgcttatttacttaaaaaatattcgtcatatataggctgttcattgatagctatggtattttcggtcaatctgtctattcaacaaataaatgggagtttcatctatcaatatttatgatcttggtcatcaataatgaattttccttaagagtttgtatact

SEQ ID NO: 1182 - DNA, 200 bp, Commelina diffusa
agtatacaaactcttaaggaaaattcattattgatgaccaagatcataaatattgatagatgaaactcccatttatttgttgaatagacagattgaccgaaaataccatagctatcaatgaacagcctatatatgacgaatattttttaagtaaataagcaatctaacattctacaagtataacactccaattatcctca

SEQ ID NO: 1183 - DNA, 200 bp, Commelina diffusa
aattttccttaagagtttgtatacttgattgatctgctaactcctattatgtcaatgctaattactattgtcggaatcttagttcttataggggaattgaagaatgttgttagctttatttttccgcaactgattgccattaattcgatcagggaacgaccgtagtggagaacttgttgaacagcgacgatgtctcctat

SEQ ID NO: 1184 - DNA, 200 bp, Commelina diffusa
ataggagacatcgtcgctgttcaacaagttctccactacggtcgttccctgatcgaattaatggcaatcagttgcggaaaaataaagctaacaacattcttcaattcccctataagaactaagattccgacaatagtaattagcattgacataataggagttagcagatcaatcaagtatacaaactcttaaggaaaatt

SEQ ID NO: 1185 - DNA, 200 bp, Commelina diffusa
gttgaacagcgacgatgtctcctatatgattgcttccttaaggacactgggaatctctgttgaacatgatgttgcaaccaaaagagcacttgttaaaggatctggaggccaattcccagtcggtaacgaatcgaaagaagttaagctgttcttaggaaacgcgggaactgcaatacgaccactaactgctgctgttgcag

SEQ ID NO: 1186 - DNA, 200 bp, Commelina diffusa
ctgcaacagcagcagttagtggtcgtattgcagttcccgcgtttcctaagaacagcttaacttctttcgattcgttaccgactgggaattggcctccagatcctttaacaagtgctcttttggttgcaacatcatgttcaacagagattcccagtgtccttaaggaagcaatcatataggagacatcgtcgctgttcaac

SEQ ID NO: 1187 - DNA, 200 bp, Commelina diffusa
cgaccactaactgctgctgttgcagctgctggtggaaatgcaaggttttttatcacattttaaatcctggcaatgtttcttcgtctgcgtattcctaaattctatttttctgtttatcttcagctacgtacttgatgggttgtcgaggatgagggaaagacccatcggagatttggtcgatggcttgaggcagtttggtt

SEQ ID NO: 1188 - DNA, 200 bp, Commelina diffusa
aaccaaactgcctcaagccatcgaccaaatctccgatgggtctttccctcatcctcgacaacccatcaagtacgtagctgaagataaacagaaaaatagaatttaggaatacgcagacgaagaaacattgccaggatttaaaatgtgataaaaaaccttgcatttccaccagcagctgcaacagcagcagttagtggtcg

SEQ ID NO: 1189 - DNA, 200 bp, Commelina diffusa
gtcgatggcttgaggcagtttggttgcgatgctgattgtttcctgggaaccaactgcccacccgttcgtgtaaatgcgaagggaggcctccgtggtggaaaggtttgtatgacaattagttgatccaagagagtttcatgccatgcttcaccaccgatgtttactcaacaaaagatgcataagaaatgaaagcaaaccac

SEQ ID NO: 1190 - DNA, 200 bp, Commelina diffusa
gtggtttgctttcatttcttatgcatcttttgttgagtaaacatcggtggtgaagcatggcatgaaactctcttggatcaactaattgtcatacaaacctttccaccacggaggcctcccttcgcatttacacgaacgggtgggcagttggttcccaggaaacaatcagcatcgcaaccaaactgcctcaagccatcgac

SEQ ID NO: 1191 - DNA, 200 bp, Commelina diffusa
tgcataagaaatgaaagcaaaccactctattctgaccaaagatccggtcgaatatggtcatattcggttggaaattcatattttctgactgaaaaaccagttgtagtgatcggttgtctcaggcctggtcgcaaactgaaccacccctcaattcgaaatatacggtcagaataggacctgacttttgtagtgtatgcccg

SEQ ID NO: 1192 - DNA, 200 bp, Commelina diffusa
cgggcatacactacaaaagtcaggtcctattctgaccgtatatttcgaattgaggggtggttcagtttgcgaccaggcctgagacaaccgatcactacaactggtttttcagtcagaaaatatgaatttccaaccgaatatgaccatattcgaccggatctttggtcagaatagagtggtttgctttcatttcttatgca

SEQ ID NO: 1193 - DNA, 200 bp, Commelina diffusa
acctgacttttgtagtgtatgcccgacaagtgctacgccagtcattggtataaaaaaattagggatatgctttagtatccatggaacaagagtagcccggttcgttttcccaaattagtgctaaaatttcaagaatgagttattcctgtgctcaaaagatatatatcactcctgcctaaacttgattttagcttatcttt

SEQ ID NO: 1194 - DNA, 200 bp, Commelina diffusa
aaagataagctaaaatcaagtttaggcaggagtgatatatatcttttgagcacaggaataactcattcttgaaattttagcactaatttgggaaaacgaaccgggctactcttgttccatggatactaaagcatatccctaatttttttataccaatgactggcgtagcacttgtcgggcatacactacaaaagtcaggt

SEQ ID NO: 1195 - DNA, 200 bp, Commelina diffusa
ctaaacttgattttagcttatctttgattagagaattgatgtagttaattcaatttgcctaatgataggactaacaaaaatccaaaaaaaaaaaaactttgataatgctaaagactattaactatgctgattcattttttgttttttaattgataaaggtagtcttgtttcctatttccttcttgtttttttatcaatag

SEQ ID NO: 1196 - DNA, 200 bp, Commelina diffusa
ctattgataaaaaaacaagaaggaaataggaaacaagactacctttatcaattaaaaaacaaaaaatgaatcagcatagttaatagtctttagcattatcaaagtttttttttttttggatttttgttagtcctatcattaggcaaattgaattaactacatcaattctctaatcaaagataagctaaaatcaagtttag

SEQ ID NO: 1197 - DNA, 200 bp, Commelina diffusa
ttccttcttgtttttttatcaatagaaactaggatttggaattggcttgctaagaccctatgattaattcgattgaaagagtaactagatgctgctggtgactagaagatgaagaaggcgagagatcgtattccattccagtaaatttagtggaatcaagcaaaatgattcgtcatcgaagactaaatagtatatcatag

SEQ ID NO: 1198 - DNA, 200 bp, Commelina diffusa
ctatgatatactatttagtcttcgatgacgaatcattttgcttgattccactaaatttactggaatggaatacgatctctcgccttcttcatcttctagtcaccagcagcatctagttactctttcaatcgaattaatcatagggtcttagcaagccaattccaaatcctagtttctattgataaaaaaacaagaaggaa

SEQ ID NO: 1199 - DNA, 200 bp, Commelina diffusa
tcgaagactaaatagtatatcataggatcttgtaaattcaaaagggttttcatttttgaattaggatgtaaccgaagttgatgaacttgttttataaggtctaagttgtttgttcctttcacttcctgcagataactttttttcgaatcttcttgcattatgtgtatcttttgcttaatatatacactcgtagattaatg

SEQ ID NO: 1200 - DNA, 200 bp, Commelina diffusa
cattaatctacgagtgtatatattaagcaaaagatacacataatgcaagaagattcgaaaaaaagttatctgcaggaagtgaaaggaacaaacaacttagaccttataaaacaagttcatcaacttcggttacatcctaattcaaaaatgaaaacccttttgaatttacaagatcctatgatatactatttagtcttcga

SEQ ID NO: 1201 - DNA, 200 bp, Commelina diffusa
taatatatacactcgtagattaatggcttggcatctctgtacgcaggtgaaactctctggatcgattagcagccagtacttaactgctttgctcatggcagctcctttagcccttggagacgtcgagatcgagatcattgacaggctcatatcggccccctatgtggagatgactctaaaagtgatggaacgttttggcg

SEQ ID NO: 1202 - DNA, 200 bp, Commelina diffusa
cgccaaaacgttccatcacttttagagtcatctccacatagggggccgatatgagcctgtcaatgatctcgatctcgacgtctccaagggctaaaggagctgccatgagcaaagcagttaagtactggctgctaatcgatccagagagtttcacctgcgtacagagatgccaagccattaatctacgagtgtatatatta

SEQ ID NO: 1203 - DNA, 200 bp, Commelina diffusa
ctaaaagtgatggaacgttttggcgttaaggtagagcattccgatagcttggataggttcctcgtcaagtgtggccagaaatacaggtcagtattcaagtgactaaatcacattaacattatcggcatcacatgtgtgcacattctcttctttgtggcaggtctccaggaatagcttatgtcgaaggcgatgcatcgagt

SEQ ID NO: 1204 - DNA, 200 bp, Commelina diffusa
actcgatgcatcgccttcgacataagctattcctggagacctgccacaaagaagagaatgtgcacacatgtgatgccgataatgttaatgtgatttagtcacttgaatactgacctgtatttctggccacacttgacgaggaacctatccaagctatcggaatgctctaccttaacgccaaaacgttccatcacttttag

SEQ ID NO: 1205 - DNA, 200 bp, Commelina diffusa
ttatgtcgaaggcgatgcatcgagtgccagttacttcttagctggtgctgcagtcactggcggtatcgtcaccgttgaaggctgtggtaccaccagtcttcaggtatttttattactttgaaactgtacaaaatcctttgtttcttatcgtcgaataaaatgatgtttcatcttgtgttttctgcttagggtgatgtgag

SEQ ID NO: 1206 - DNA, 200 bp, Commelina diffusa
ctcacatcaccctaagcagaaaacacaagatgaaacatcattttattcgacgataagaaacaaaggattttgtacagtttcaaagtaataaaaatacctgaagactggtggtaccacagccttcaacggtgacgataccgccagtgactgcagcaccagctaagaagtaactggcactcgatgcatcgccttcgacataa

SEQ ID NO: 1207 - DNA, 200 bp, Commelina diffusa
tgttttctgcttagggtgatgtgagatttgctgaagttcttgagaaaatgggagcaaaagttacatggactgaggacagtgttacggttactggtccaccacgcgatccttcaaagagagggaacttacggggaatcgatgttaacatgaataaaataccggatgtcgctatgacgcttgcagttgttgcattgtttgcc

SEQ ID NO: 1208 - DNA, 200 bp, Commelina diffusa
ggcaaacaatgcaacaactgcaagcgtcatagcgacatccggtattttattcatgttaacatcgattccccgtaagttccctctctttgaaggatcgcgtggtggaccagtaaccgtaacactgtcctcagtccatgtaacttttgctcccattttctcaagaacttcagcaaatctcacatcaccctaagcagaaaaca

SEQ ID NO: 1209 - DNA, 200 bp, Commelina diffusa
gcttgcagttgttgcattgtttgccgatggccctacggctataagagatggttagttatcgaaagaaaaattagctgcaaaagcactaaagaatatcgaattcaataccaaattgcacacggtgtttgataaccaactatctcaatctacttctgtttagggtctatttgatttgagagacttgagaattaacttctgta

SEQ ID NO: 1210 - DNA, 200 bp, Commelina diffusa
tacagaagttaattctcaagtctctcaaatcaaatagaccctaaacagaagtagattgagatagttggttatcaaacaccgtgtgcaatttggtattgaattcgatattctttagtgcttttgcagctaatttttctttcgataactaaccatctcttatagccgtagggccatcggcaaacaatgcaacaactgcaagc

SEQ ID NO: 1211 - DNA, 200 bp, Commelina diffusa
agagacttgagaattaacttctgtagttggtactacaatctaaatggtgtaatgcgaactgcggcagttgaaagttttttaacatacaagacggattccgtgacttataactcaactacatcaaactaaacaagcgatacaaaattacttcatttaactactccagttcaactttaactacatcaaactaaatagcctcc

SEQ ID NO: 1212 - DNA, 200 bp, Commelina diffusa
ggaggctatttagtttgatgtagttaaagttgaactggagtagttaaatgaagtaattttgtatcgcttgtttagtttgatgtagttgagttataagtcacggaatccgtcttgtatgttaaaaaactttcaactgccgcagttcgcattacaccatttagattgtagtaccaactacagaagttaattctcaagtctct

SEQ ID NO: 1213 - DNA, 200 bp, Commelina diffusa
aactacatcaaactaaatagcctcctagcagcacaaaaactctaatcaacgttgcagcgttcacagaacaagaaagtgccaacactcacacttatatacgatatgcagaatcttttttattcgaaatatcttctttattaacttgttttctctatttttagtggcttcttggagagttaaggagacggagaggatgatag

SEQ ID NO: 1214 - DNA, 200 bp, Commelina diffusa
ctatcatcctctccgtctccttaactctccaagaagccactaaaaatagagaaaacaagttaataaagaagatatttcgaataaaaaagattctgcatatcgtatataagtgtgagtgttggcactttcttgttctgtgaacgctgcaacgttgattagagtttttgtgctgctaggaggctatttagtttgatgtagtt

SEQ ID NO: 1215 - DNA, 200 bp, Commelina diffusa
gttaaggagacggagaggatgatagccatttgcacagagctccgaaaggtcggtaatgttcattctcttgtaacttagctctcggttttcacattctgatttttctattgtattatgttttggttcagctcggtgctacagttgaagaagggccagattattgcattatccatccacctgaaaagctgaacgtaacggct

SEQ ID NO: 1216 - DNA, 200 bp, Commelina diffusa
agccgttacgttcagcttttcaggtggatggataatgcaataatctggcccttcttcaactgtagcaccgagctgaaccaaaacataatacaatagaaaaatcagaatgtgaaaaccgagagctaagttacaagagaatgaacattaccgacctttcggagctctgtgcaaatggctatcatcctctccgtctccttaac

SEQ ID NO: 1217 - DNA, 200 bp, Commelina diffusa
acctgaaaagctgaacgtaacggctatcaacacatacgacgatcaccggatggcaatggcattctctattgctgcctgcgccgacatccccgttgcaatcaaagaccctggttgtactcgcaagacttttccggactattttgatgttctgcatagtcttgccaagtactgaacgaaacctacgaaagttaatttagtcg

SEQ ID NO: 1218 - DNA, 200 bp, Commelina diffusa
cgactaaattaactttcgtaggtttcgttcagtacttggcaagactatgcagaacatcaaaatagtccggaaaagtcttgcgagtacaaccagggtctttgattgcaacggggatgtcggcgcaggcagcaatagagaatgccattgccatccggtgatcgtcgtatgtgttgatagccgttacgttcagcttttcaggt

SEQ ID NO: 1219 - DNA, 200 bp, Commelina diffusa
aaacctacgaaagttaatttagtcgacttggttggtgaatcagttttcatgtaaaattgtgtaattcgtgtattaataatctttttcatacaaaataaacacggcaaaattttctttagcaacaattgagttgatcaaaacacagcacaattattttggtacaaaaatattttcatatattaacataactaaccaactaa

SEQ ID NO: 1220 - DNA, 200 bp, Commelina diffusa
ttagttggttagttatgttaatatatgaaaatatttttgtaccaaaataattgtgctgtgttttgatcaactcaattgttgctaaagaaaattttgccgtgtttattttgtatgaaaaagattattaatacacgaattacacaattttacatgaaaactgattcaccaaccaagtcgactaaattaactttcgtaggttt

SEQ ID NO: 1221 - DNA, 200 bp, Commelina diffusa
tatattaacataactaaccaactaactagtttgtctagaaaataaaagctaagaaacaaaaatcataacaacaaatcagtaggcagtttataactgaaataactgccctctagtttaaacacaacaaagccctttccttccctccaaaactaaaacttcgaccgattctccgaaaattccttctctcccacccccatttc

SEQ ID NO: 1222 - DNA, 200 bp, Commelina diffusa
gaaatgggggtgggagagaaggaattttcggagaatcggtcgaagttttagttttggagggaaggaaagggctttgttgtgtttaaactagagggcagttatttcagttataaactgcctactgatttgttgttatgatttttgtttcttagcttttattttctagacaaactagttagttggttagttatgttaatata

SEQ ID NO: 1223 - DNA, 200 bp, Commelina diffusa
attccttctctcccacccccatttcctcccatcttctaggactccaaagtcatctttcccctctccaccacagctgaaccttggtcagtacagccctggagattgagggataatactgtcagtgctatcgttcgatgttgggacaatatcgagtgcctaaagtcttctgttccttttatgcagcaacacctcaaagaatt

SEQ ID NO: 1224 - DNA, 200 bp, Commelina diffusa
aattctttgaggtgttgctgcataaaaggaacagaagactttaggcactcgatattgtcccaacatcgaacgatagcactgacagtattatccctcaatctccagggctgtactgaccaaggttcagctgtggtggagaggggaaagatgactttggagtcctagaagatgggaggaaatgggggtgggagagaaggaat

SEQ ID NO: 1225 - DNA, 200 bp, Commelina diffusa
ttatgcagcaacacctcaaagaattccgggtcccattttcctttccttcccctttggagtttgttggtgattgttgtttttgtttgtttggtggtaggaaatgatggagagttatggggtaaagttggagagatgttgtgaggaaattgaaatgaagagggtggagatggagaccgaggatgtcgagcgaaagaaattgg

SEQ ID NO: 1226 - DNA, 200 bp, Commelina diffusa
ccaatttctttcgctcgacatcctcggtctccatctccaccctcttcatttcaatttcctcacaacatctctccaactttaccccataactctccatcatttcctaccaccaaacaaacaaaaacaacaatcaccaacaaactccaaaggggaaggaaaggaaaatgggacccggaattctttgaggtgttgctgcataa

SEQ ID NO: 1227 - DNA, 200 bp, Commelina diffusa
gaggatgtcgagcgaaagaaattggaggaggagagatcattgacgctcctgtgggattttgggcctagcgtggactagttgtagacgggtggtttgtcgagatttctcctgtagagcgtcctcggactttctctagatttctttgtgggttctcaaggagggtcccccataaggtttgggccactaggatgatgtcaaca

SEQ ID NO: 1228 - DNA, 200 bp, Commelina diffusa
tgttgacatcatcctagtggcccaaaccttatgggggaccctccttgagaacccacaaagaaatctagagaaagtccgaggacgctctacaggagaaatctcgacaaaccacccgtctacaactagtccacgctaggcccaaaatcccacaggagcgtcaatgatctctcctcctccaatttctttcgctcgacatcctc

SEQ ID NO: 1229 - DNA, 200 bp, Commelina diffusa
ttgggccactaggatgatgtcaacatgtgcgctaggtgaacctaagttcgttatgactttgcgtgcgtcatatgatccgtactggacgaacatgagaaaggagtgagacacatgccccttgcttagtgccagttgtactttttgtaggatttgggaatggctcccaactcttgagtcattagtgtggtatttgtgccatt

SEQ ID NO: 1230 - DNA, 200 bp, Commelina diffusa
aatggcacaaataccacactaatgactcaagagttgggagccattcccaaatcctacaaaaagtacaactggcactaagcaaggggcatgtgtctcactcctttctcatgttcgtccagtacggatcatatgacgcacgcaaagtcataacgaacttaggttcacctagcgcacatgttgacatcatcctagtggcccaa

SEQ ID NO: 1231 - DNA, 200 bp, Commelina diffusa
tcattagtgtggtatttgtgccattaatgcatggatcttcgggggtgagccctaaagacgaggtcctacgatcgtgggtgttggggatttagccatcctaagcatggggctcctggatctctgaggacatttgtcacggggccgttggatccccagacatatcatgacactcttacaagtgtctgagcctgactgttctt

SEQ ID NO: 1232 - DNA, 200 bp, Commelina diffusa
aagaacagtcaggctcagacacttgtaagagtgtcatgatatgtctggggatccaacggccccgtgacaaatgtcctcagagatccaggagccccatgcttaggatggctaaatccccaacacccacgatcgtaggacctcgtctttagggctcacccccgaagatccatgcattaatggcacaaataccacactaatga

SEQ ID NO: 1233 - DNA, 200 bp, Commelina diffusa
caagtgtctgagcctgactgttcttggaatcgctgggtcccaagacggattagtcattatcctctataggcccgtcttgaaaaatgttgaggccttgtgccaaattaaaaatagggctttaactaaataaaataaataaattttaatttttcgaatacattagtctcttccttaaaacaacaaaaactattaacaaaata

SEQ ID NO: 1234 - DNA, 200 bp, Commelina diffusa
tattttgttaatagtttttgttgttttaaggaagagactaatgtattcgaaaaattaaaatttatttattttatttagttaaagccctatttttaatttggcacaaggcctcaacatttttcaagacgggcctatagaggataatgactaatccgtcttgggacccagcgattccaagaacagtcaggctcagacacttg

SEQ ID NO: 1235 - DNA, 200 bp, Commelina diffusa
aacaacaaaaactattaacaaaataaaaaaatcaatacaatacattaaaatgaagctatgaaacaatcggagcaatcacgaaataccaacataacagtctaaaatagcaaaaattagtatataactcttaaaaaattacacaaattatatagctatacttaaaaaataaataattaaaaaataaatttctaataagtgga

SEQ ID NO: 1236 - DNA, 200 bp, Commelina diffusa
tccacttattagaaatttattttttaattatttattttttaagtatagctatataatttgtgtaattttttaagagttatatactaatttttgctattttagactgttatgttggtatttcgtgattgctccgattgtttcatagcttcattttaatgtattgtattgatttttttattttgttaatagtttttgttgtt

SEQ ID NO: 1237 - DNA, 200 bp, Commelina diffusa
aaaaaataaatttctaataagtggaggatatggattgggcacccttaaagtggaggccctgtgctgtagggctaatagaaccccccacagagaccccttatcctctagtttgtctttgatttttactcttgttgtcaatatagaagaacaaaagagaataatctagtgtgctttttcttgttgttgtggttaattttatt

SEQ ID NO: 1238 - DNA, 200 bp, Commelina diffusa
aataaaattaaccacaacaacaagaaaaagcacactagattattctcttttgttcttctatattgacaacaagagtaaaaatcaaagacaaactagaggataaggggtctctgtggggggttctattagccctacagcacagggcctccactttaagggtgcccaatccatatcctccacttattagaaatttatttttt

SEQ ID NO: 1239 - DNA, 200 bp, Commelina diffusa
tcttgttgttgtggttaattttattgtttttgatatggaagaatgcaataacactattgtgtttcttgttgttgtcgtcgtcaaaattcttctcattgttcttagtgttgacagatggtatttggtaatatttatgaattttttttgttgaagtaatataatccaatgttctttttgttcatgttagattcaacgaatga

SEQ ID NO: 1240 - DNA, 200 bp, Commelina diffusa
tcattcgttgaatctaacatgaacaaaaagaacattggattatattacttcaacaaaaaaaattcataaatattaccaaataccatctgtcaacactaagaacaatgagaagaattttgacgacgacaacaacaagaaacacaatagtgttattgcattcttccatatcaaaaacaataaaattaaccacaacaacaaga

SEQ ID NO: 1241 - DNA, 200 bp, Commelina diffusa
tgttcatgttagattcaacgaatgatctagtgcctatgttagcattgtgttgatgtctaggaatgaaatgttgttatcgtctagtattgattatgatttgttatcaatatgctgaatgaatttgattattgatataatgtttggcattacgcattttcaaagtgcgaggattaagtatgatttgtcgagacgtaggaagc

SEQ ID NO: 1242 - DNA, 200 bp, Commelina diffusa
gcttcctacgtctcgacaaatcatacttaatcctcgcactttgaaaatgcgtaatgccaaacattatatcaataatcaaattcattcagcatattgataacaaatcataatcaatactagacgataacaacatttcattcctagacatcaacacaatgctaacataggcactagatcattcgttgaatctaacatgaaca

SEQ ID NO: 1243 - DNA, 200 bp, Commelina diffusa
tatgatttgtcgagacgtaggaagcaatccctataagagattattgctttctataaatgataggtattgttaactcttcctgatgttttctctcatttctctaaaaatgtagatttgattcatatgttagaattagtgatggtcatagggcgggttggggtgggtaggcactcccccgcgacccgccctgctaaatacat

SEQ ID NO: 1244 - DNA, 200 bp, Commelina diffusa
atgtatttagcagggcgggtcgcgggggagtgcctacccaccccaacccgccctatgaccatcactaattctaacatatgaatcaaatctacatttttagagaaatgagagaaaacatcaggaagagttaacaatacctatcatttatagaaagcaataatctcttatagggattgcttcctacgtctcgacaaatcata

SEQ ID NO: 1245 - DNA, 200 bp, Commelina diffusa
ccgcgacccgccctgctaaatacatatccgccccgaaactcagctcgctttgggttttaaaaacatgactcatgacccgtcccacaacggaatgggtcgaccagcgggtcgccctgttcaccaagttatttataaaaaaaaatatatgcatacttatataaaatattataggcttatgtgcatgtatttaattctataca

SEQ ID NO: 1246 - DNA, 200 bp, Commelina diffusa
tgtatagaattaaatacatgcacataagcctataatattttatataagtatgcatatatttttttttataaataacttggtgaacagggcgacccgctggtcgacccattccgttgtgggacgggtcatgagtcatgtttttaaaacccaaagcgagctgagtttcggggcggatatgtatttagcagggcgggtcgcgg

SEQ ID NO: 1247 - DNA, 200 bp, Commelina diffusa
atgtgcatgtatttaattctatacattttaaattataattaaagtttgtagttaaatctattaaaattttattttttaaactataaagtactaaactataatattaaacttataaaaaaatagatatattatactataaatatgcggggcgggtacgcgtggcaggaataaccatgacctgtgacccgctccgtcccgtt

SEQ ID NO: 1248 - DNA, 200 bp, Commelina diffusa
aacgggacggagcgggtcacaggtcatggttattcctgccacgcgtacccgccccgcatatttatagtataatatatctatttttttataagtttaatattatagtttagtactttatagtttaaaaaataaaattttaatagatttaactacaaactttaattataatttaaaatgtatagaattaaatacatgcacat

SEQ ID NO: 1249 - DNA, 200 bp, Commelina diffusa
gacctgtgacccgctccgtcccgttgcgggtcaaaaataaccgccccactacccaccccacaacccgtttagttaacctgtttataatccattcgggtcgaaaaccctataggacgagtaattttttgccccatgaccatccctagctagttagaacaatgtgtagttagagtaggatctcagcaaggaacggagactct

SEQ ID NO: 1250 - DNA, 200 bp, Commelina diffusa
agagtctccgttccttgctgagatcctactctaactacacattgttctaactagctagggatggtcatggggcaaaaaattactcgtcctatagggttttcgacccgaatggattataaacaggttaactaaacgggttgtggggtgggtagtggggcggttatttttgacccgcaacgggacggagcgggtcacaggtc

SEQ ID NO: 1251 - DNA, 200 bp, Commelina diffusa
gatctcagcaaggaacggagactcttttcacacatttttaaaaagtaatgatggaaaactagataaagatctcatactctttttgcgaattcacaaaaagtaataaactaaactcatagcaacaattattatcttacatatagataattcctcgtatcttgttcattcgcaataaattattttagttttaaagatacatg

SEQ ID NO: 1252 - DNA, 200 bp, Commelina diffusa
catgtatctttaaaactaaaataatttattgcgaatgaacaagatacgaggaattatctatatgtaagataataattgttgctatgagtttagtttattactttttgtgaattcgcaaaaagagtatgagatctttatctagttttccatcattactttttaaaaatgtgtgaaaagagtctccgttccttgctgagatc

SEQ ID NO: 1253 - DNA, 200 bp, Commelina diffusa
attattttagttttaaagatacatgcaactagagtcacatgtattcgacatatttataaccaacgatttttcgttctgaattatcacttttgtaagatacatttgtcaacaatgttgtacaaaatcgttatattgatctatatgcacttgtaagtacacaacatggactaacatatgcatgtatattataaatatcaact

SEQ ID NO: 1254 - DNA, 200 bp, Commelina diffusa
agttgatatttataatatacatgcatatgttagtccatgttgtgtacttacaagtgcatatagatcaatataacgattttgtacaacattgttgacaaatgtatcttacaaaagtgataattcagaacgaaaaatcgttggttataaatatgtcgaatacatgtgactctagttgcatgtatctttaaaactaaaataat

SEQ ID NO: 1255 - DNA, 200 bp, Commelina diffusa
tgcatgtatattataaatatcaacttgtacatatatgatatggttgaacgtatatgcactatacttttatggcatgaaactccttgttctttgggacatgcacatcttgtcttttattttcttaatatatatacttttcttttcttaagaaaaaaaataaatctagagcttgttgtggtatacatttgcgttctctgtct

SEQ ID NO: 1256 - DNA, 200 bp, Commelina diffusa
agacagagaacgcaaatgtataccacaacaagctctagatttattttttttcttaagaaaagaaaagtatatatattaagaaaataaaagacaagatgtgcatgtcccaaagaacaaggagtttcatgccataaaagtatagtgcatatacgttcaaccatatcatatatgtacaagttgatatttataatatacatgca

SEQ ID NO: 1257 - DNA, 200 bp, Commelina diffusa
tggtatacatttgcgttctctgtctttcttaaatatctactatactaacgatctattgcttgcttagtgcggcaaaaggaaccttttttttttcttaatatatactaaaatttttacttctcttcttaaataaataaataataataaaaaacttgttgctacatacatttgcaccctacctttcttcaatatcagttaca

SEQ ID NO: 1258 - DNA, 200 bp, Commelina diffusa
tgtaactgatattgaagaaaggtagggtgcaaatgtatgtagcaacaagttttttattattatttatttatttaagaagagaagtaaaaattttagtatatattaagaaaaaaaaaaggttccttttgccgcactaagcaagcaatagatcgttagtatagtagatatttaagaaagacagagaacgcaaatgtatacca

SEQ ID NO: 1259 - DNA, 200 bp, Commelina diffusa
ctacctttcttcaatatcagttacactttctactcttttactaaatagctaggaaaaaaaaatctacggcacaaaggacaattcttacctttcacaaggaaaaaaaaaaaataaaaaaaaatcatgttatttaaaagacactttcaagtttgggtacaaatggcgtcaacctcgaacattgtttgaatcagaatcgtttc

SEQ ID NO: 1260 - DNA, 200 bp, Commelina diffusa
gaaacgattctgattcaaacaatgttcgaggttgacgccatttgtacccaaacttgaaagtgtcttttaaataacatgatttttttttattttttttttttccttgtgaaaggtaagaattgtcctttgtgccgtagatttttttttcctagctatttagtaaaagagtagaaagtgtaactgatattgaagaaaggtag

SEQ ID NO: 1261 - DNA, 200 bp, Commelina diffusa
acattgtttgaatcagaatcgtttcaattatatgttcctagtccctagagtaagaagtcactttttgcttagcacgtgagactatcttacaagtggactaccccaacactccacatccccctccacctccgccatcgccttctgtgcctgtctcttcgcctcccttgccaaccccgtggcctcctcgaccgaaaccgcgc

SEQ ID NO: 1262 - DNA, 200 bp, Commelina diffusa
gcgcggtttcggtcgaggaggccacggggttggcaagggaggcgaagagacaggcacagaaggcgatggcggaggtggagggggatgtggagtgttggggtagtccacttgtaagatagtctcacgtgctaagcaaaaagtgacttcttactctagggactaggaacatataattgaaacgattctgattcaaacaatgt

SEQ ID NO: 1263 - DNA, 200 bp, Commelina diffusa
gtggcctcctcgaccgaaaccgcgcgagtagcggctgcgagcattaagttagctttgttggcattgcccgcagctctctgaaaactatattccatcatggaggcgcaaagttccatctcggctttttcttctatgtattgggagtgttgaaactcctcctttgcagaggttgcttcggctttgtaactaggtagtttggg

SEQ ID NO: 1264 - DNA, 200 bp, Commelina diffusa
cccaaactacctagttacaaagccgaagcaacctctgcaaaggaggagtttcaacactcccaatacatagaagaaaaagccgagatggaactttgcgcctccatgatggaatatagttttcagagagctgcgggcaatgccaacaaagctaacttaatgctcgcagccgctactcgcgcggtttcggtcgaggaggccac

SEQ ID NO: 1265 - DNA, 200 bp, Commelina diffusa
cggctttgtaactaggtagtttgggctcgtaaagtgctttggcttcccgtagacgagactccgcttttgcgatatagagagaagcctcttgtagttgcatttttaaggcttttcttgggtttgtctttgcgaggatggagatgtaggattttgtgagacagtgaggaagttttgcccaccatggctttgctattgtgctc

SEQ ID NO: 1266 - DNA, 200 bp, Commelina diffusa
gagcacaatagcaaagccatggtgggcaaaacttcctcactgtctcacaaaatcctacatctccatcctcgcaaagacaaacccaagaaaagccttaaaaatgcaactacaagaggcttctctctatatcgcaaaagcggagtctcgtctacgggaagccaaagcactttacgagcccaaactacctagttacaaagccg

SEQ ID NO: 1267 - DNA, 200 bp, Conyza canadensis
aatatcaacaaaatctttcaccatgtcaaacaacgaaaaccaaagtaacgacctttggaatcactttcaagaaaacccgatgctgagtatgcccctgatgccgcctataccggttatatcatcagctaaccaaggccaaacaagccatgtttcaggctcatccaacccgaccccaatggggagaccagttccgacgggtt

SEQ ID NO: 1268 - DNA, 200 bp, Conyza canadensis
aacccgtcggaactggtctccccattggggtcgggttggatgagcctgaaacatggcttgtttggccttggttagctgatgatataaccggtataggcggcatcaggggcatactcagcatcgggttttcttgaaagtgattccaaaggtcgttactttggttttcgttgtttgacatggtgaaagattttgttgatatt

SEQ ID NO: 1269 - DNA, 200 bp, Conyza canadensis
atggggagaccagttccgacgggtttgtcgcaatacgacctagaagcacatatgagttatcgccaacacttgcaacagaactatgcaagctcgttttatgcaccaccggcggcaccggggccacaaccgggtcctagccacgacccggaagaggacgaggatgaccagaccgccgacggcgagtagtttttttaaaatac

SEQ ID NO: 1270 - DNA, 200 bp, Conyza canadensis
gtattttaaaaaaactactcgccgtcggcggtctggtcatcctcgtcctcttccgggtcgtggctaggacccggttgtggccccggtgccgccggtggtgcataaaacgagcttgcatagttctgttgcaagtgttggcgataactcatatgtgcttctaggtcgtattgcgacaaacccgtcggaactggtctccccat

SEQ ID NO: 1271 - DNA, 200 bp, Conyza canadensis
acggcgagtagtttttttaaaatactcgtaatgttttatttttctttgcaatgttttatttttaagtgtgttatgtgttttatttttagtggtaatgtttaattgtaatgtttttttaatttagttgtaatggttaatttttaataaaattaagtagttttttaagtttgtgtaaatataaaataaaaaaaataaaaagt

SEQ ID NO: 1272 - DNA, 200 bp, Conyza canadensis
actttttattttttttattttatatttacacaaacttaaaaaactacttaattttattaaaaattaaccattacaactaaattaaaaaaacattacaattaaacattaccactaaaaataaaacacataacacacttaaaaataaaacattgcaaagaaaaataaaacattacgagtattttaaaaaaactactcgccgt

SEQ ID NO: 1273 - DNA, 200 bp, Conyza canadensis
atataaaataaaaaaaataaaaagtgtggaagaggggttatagggagtgattgtggaagaggtggatgaagaaagagaaaagctgacgtgacagtgtggaagagggtaaggatgaggtgctatagggagaggtcttattgagttataatgatgtcaatggcttaataacttaatgacattttggtgatgcgtaagacctt

SEQ ID NO: 1274 - DNA, 200 bp, Conyza canadensis
aaggtcttacgcatcaccaaaatgtcattaagttattaagccattgacatcattataactcaataagacctctccctatagcacctcatccttaccctcttccacactgtcacgtcagcttttctctttcttcatccacctcttccacaatcactccctataacccctcttccacactttttattttttttattttatat

SEQ ID NO: 1275 - DNA, 200 bp, Conyza canadensis
acattttggtgatgcgtaagaccttaagaccagaaagtctaagtttgaatcttataaaataggtttttttctattttccaaatttattgagttttctcatgagttcatgtatgagcattattgcatagtgaaaatatggtcagatggtttcatcgatgacaagctaatttttaagaaagatatattacttttctttttaa

SEQ ID NO: 1276 - DNA, 200 bp, Conyza canadensis
ttaaaaagaaaagtaatatatctttcttaaaaattagcttgtcatcgatgaaaccatctgaccatattttcactatgcaataatgctcatacatgaactcatgagaaaactcaataaatttggaaaatagaaaaaaacctattttataagattcaaacttagactttctggtcttaaggtcttacgcatcaccaaaatgt

SEQ ID NO: 1277 - DNA, 200 bp, Conyza canadensis
aaagatatattacttttctttttaacttgggaaaatcataaaagtgaaatcatcgttttaactttttacgagcatggtactcgcgtaatgcagcggcggtggtatagaagacggtctaatggtggcagtgtcaagtggtgtaggtctatgtgcaccgaaactccaaactgacatagccgtacccatttccgaaactccat

SEQ ID NO: 1278 - DNA, 200 bp, Conyza canadensis
atggagtttcggaaatgggtacggctatgtcagtttggagtttcggtgcacatagacctacaccacttgacactgccaccattagaccgtcttctataccaccgccgctgcattacgcgagtaccatgctcgtaaaaagttaaaacgatgatttcacttttatgattttcccaagttaaaaagaaaagtaatatatcttt

SEQ ID NO: 1279 - DNA, 200 bp, Conyza canadensis
gccgtacccatttccgaaactccatggaaacgttttctcttacgaaacacgtatgaaacattccctaaaattttctatagattaaacgtttctttgaagtttccatacggtttctaattaatatcaaggttttaaaggactttttcgaatccccaaacccaaacatgttatattatatacaatttgatcaacattaaatt

SEQ ID NO: 1280 - DNA, 200 bp, Conyza canadensis
aatttaatgttgatcaaattgtatataatataacatgtttgggtttggggattcgaaaaagtcctttaaaaccttgatattaattagaaaccgtatggaaacttcaaagaaacgtttaatctatagaaaattttagggaatgtttcatacgtgtttcgtaagagaaaacgtttccatggagtttcggaaatgggtacggc

SEQ ID NO: 1281 - DNA, 200 bp, Conyza canadensis
tatacaatttgatcaacattaaattttttatattacaaagccattattaaacactaaacattcaatgagtgatcactaatcaaacatgtattataaagttctacatatataattatacataatctctcaagtctcaaatctcctttatgaaaaaattgatataatttatatttgtatattttttttattgttgtacccgt

SEQ ID NO: 1282 - DNA, 200 bp, Conyza canadensis
acgggtacaacaataaaaaaaatatacaaatataaattatatcaattttttcataaaggagatttgagacttgagagattatgtataattatatatgtagaactttataatacatgtttgattagtgatcactcattgaatgtttagtgtttaataatggctttgtaatataaaaaatttaatgttgatcaaattgtata

SEQ ID NO: 1283 - DNA, 200 bp, Conyza canadensis
atattttttttattgttgtacccgtatcctggattttttagttttactgttccccgttcccgtattgttcccgtacccttttcccgtacctgtttcggtgctacataggtgtaggttgatgtaattgtgagagtgaaaatttttagaagacaagagtttaaagtgttaattagtaaaataaaagtttagaatgtaaatta

SEQ ID NO: 1284 - DNA, 200 bp, Conyza canadensis
taatttacattctaaacttttattttactaattaacactttaaactcttgtcttctaaaaattttcactctcacaattacatcaacctacacctatgtagcaccgaaacaggtacgggaaaagggtacgggaacaatacgggaacggggaacagtaaaactaaaaaatccaggatacgggtacaacaataaaaaaaatat

SEQ ID NO: 1285 - DNA, 200 bp, Conyza canadensis
aaataaaagtttagaatgtaaattaattcattaaggtcaaatttggtattttataaaactcttttcataatgggtgtttattaagagacaatttagtaattttatatgtgacatatgagtaactatttttattttgagaggggtgcataatttttattcgaagagtacggataaaagtcaataaattacgagcagtgaag

SEQ ID NO: 1286 - DNA, 200 bp, Conyza canadensis
cttcactgctcgtaatttattgacttttatccgtactcttcgaataaaaattatgcacccctctcaaaataaaaatagttactcatatgtcacatataaaattactaaattgtctcttaataaacacccattatgaaaagagttttataaaataccaaatttgaccttaatgaattaatttacattctaaacttttattt

SEQ ID NO: 1287 - DNA, 200 bp, Conyza canadensis
agtcaataaattacgagcagtgaagtatcccagacaccccttgcaaggtaattttttaaaattttattcatggaggtttggtaggaagtggtggtggtggtggttggtatgaaattttgtttttgaccttcttcaaacatccacctactactgacccctcccttcaaacccaacccaaaatccaaatcattaaatccttc

SEQ ID NO: 1288 - DNA, 200 bp, Conyza canadensis
gaaggatttaatgatttggattttgggttgggtttgaagggaggggtcagtagtaggtggatgtttgaagaaggtcaaaaacaaaatttcataccaaccaccaccaccaccacttcctaccaaacctccatgaataaaattttaaaaaattaccttgcaaggggtgtctgggatacttcactgctcgtaatttattgact

SEQ ID NO: 1289 - DNA, 200 bp, Conyza canadensis
caaaatccaaatcattaaatccttcaaacccactgtgtgttttgtgtgaaatttcacacacaacaaacaatggcagctactcacattaacaccaccaacattgcccacaatctccaagctaccaccagtctttccaaaacccaaaccccatcaataaagtcacaaccttttttatcttttgggccaaaacacaaaaaccc

SEQ ID NO: 1290 - DNA, 200 bp, Conyza canadensis
gggtttttgtgttttggcccaaaagataaaaaaggttgtgactttattgatggggtttgggttttggaaagactggtggtagcttggagattgtgggcaatgttggtggtgttaatgtgagtagctgccattgtttgttgtgtgtgaaatttcacacaaaacacacagtgggtttgaaggatttaatgatttggattttg

SEQ ID NO: 1291 - DNA, 200 bp, Conyza canadensis
cttttgggccaaaacacaaaaacccgattgcccatttctctgtttcttctaataataatagaaatcttggaaaaaaatgtttaatagtttctgccgttgccaccaccgagaaaccgtcaacggtgccggaaattgtgttacaacccattaaagaaatctcgggtacggttaatttacccgggtccaagtcgttgtctaat

SEQ ID NO: 1292 - DNA, 200 bp, Conyza canadensis
attagacaacgacttggacccgggtaaattaaccgtacccgagatttctttaatgggttgtaacacaatttccggcaccgttgacggtttctcggtggtggcaacggcagaaactattaaacatttttttccaagatttctattattattagaagaaacagagaaatgggcaatcgggtttttgtgttttggcccaaaag

SEQ ID NO: 1293 - DNA, 200 bp, Conyza canadensis
acccgggtccaagtcgttgtctaatcggatcctcctccttgctgcgcttgctgaggtatagtttaatttggtaataatgtttgacctttaaaatttgacatttgggctacatgattgatatgggtcttgaatgaattgtgttataaaatttgggaagttaaatgttaataatagtttaatcctttagaaattatgaagta

SEQ ID NO: 1294 - DNA, 200 bp, Conyza canadensis
tacttcataatttctaaaggattaaactattattaacatttaacttcccaaattttataacacaattcattcaagacccatatcaatcatgtagcccaaatgtcaaattttaaaggtcaaacattattaccaaattaaactatacctcagcaagcgcagcaaggaggaggatccgattagacaacgacttggacccgggt

SEQ ID NO: 1295 - DNA, 200 bp, Conyza canadensis
ttaatcctttagaaattatgaagtaatggttttagaccctgaatttttttttattgcataggttagtcccttagctagttagcttttggttgacatcttagaaaaaccagtacagtttttatattttagtccttaagcttcaattttttgcaatgtattgccatttgaaatgatctagtaaaatgttcaaaatcaatgaa

SEQ ID NO: 1296 - DNA, 200 bp, Conyza canadensis
ttcattgattttgaacattttactagatcatttcaaatggcaatacattgcaaaaaattgaagcttaaggactaaaatataaaaactgtactggtttttctaagatgtcaaccaaaagctaactagctaagggactaacctatgcaataaaaaaaaattcagggtctaaaaccattacttcataatttctaaaggattaa

SEQ ID NO: 1297 - DNA, 200 bp, Conyza canadensis
tagtaaaatgttcaaaatcaatgaattggcggtttaaagatataatgcttggatcaattgttatgtaaagtgtgctaggcggtcaaaagcgaatcttggatcaaggaagtcgtagaatactattgatttcatattattgatttcttattatgcatatttgacatgtgcttctaacatcatggcatttgggatttatttct

SEQ ID NO: 1298 - DNA, 200 bp, Conyza canadensis
agaaataaatcccaaatgccatgatgttagaagcacatgtcaaatatgcataataagaaatcaataatatgaaatcaatagtattctacgacttccttgatccaagattcgcttttgaccgcctagcacactttacataacaattgatccaagcattatatctttaaaccgccaattcattgattttgaacattttacta

SEQ ID NO: 1299 - DNA, 200 bp, Conyza canadensis
atcatggcatttgggatttatttctatatataaagcatgactgtatggttataaagttcaaaacttgtatggtataaatatactcttcttacttcttagcaggaatgtgttgacttataagctgaaaacttttataactccaattgtgtgtagtaatacttgaaagtggctgagttcctaggacagtattacatgcgaac

SEQ ID NO: 1300 - DNA, 200 bp, Conyza canadensis
gttcgcatgtaatactgtcctaggaactcagccactttcaagtattactacacacaattggagttataaaagttttcagcttataagtcaacacattcctgctaagaagtaagaagagtatatttataccatacaagttttgaactttataaccatacagtcatgctttatatatagaaataaatcccaaatgccatgat

SEQ ID NO: 1301 - DNA, 200 bp, Conyza canadensis
tcctaggacagtattacatgcgaacactacaacgtgttactaaatttgagataggtatgatttggttttgttggatacaaagtctaggtcagttaacatagccagttgaggacgatagctttcttgtcttatttcctttttatagagggtttgtgtttcgtgatggtaatattgagtaccaccatatagttcacaagtca

SEQ ID NO: 1302 - DNA, 200 bp, Conyza canadensis
tgacttgtgaactatatggtggtactcaatattaccatcacgaaacacaaaccctctataaaaaggaaataagacaagaaagctatcgtcctcaactggctatgttaactgacctagactttgtatccaacaaaaccaaatcatacctatctcaaatttagtaacacgttgtagtgttcgcatgtaatactgtcctagga

SEQ ID NO: 1303 - DNA, 200 bp, Conyza canadensis
gtaccaccatatagttcacaagtcatataataaaatcagagcaacattcgaggagtcgcctatatgcatattattgcaccatgctaaaatccaagggcatattttgatgccaatttgtaatttatttctcagggaacgaccattgttgacaacttactcaacagtgatgatgttcattacatgcttggagctttaagaac

SEQ ID NO: 1304 - DNA, 200 bp, Conyza canadensis
gttcttaaagctccaagcatgtaatgaacatcatcactgttgagtaagttgtcaacaatggtcgttccctgagaaataaattacaaattggcatcaaaatatgcccttggattttagcatggtgcaataatatgcatataggcgactcctcgaatgttgctctgattttattatatgacttgtgaactatatggtggtac

SEQ ID NO: 1305 - DNA, 200 bp, Conyza canadensis
attacatgcttggagctttaagaactctagggctaaacgttgaggaggatgttgcaattaaaagggcaattgtggaaggttgtggcggtgtgtttcctgtgggtaaagaagctaaagatgacatacagctttttcttgggaatgcaggaactgctatgcgtccattgactgccgcagttactgctgctggtggtaattca

SEQ ID NO: 1306 - DNA, 200 bp, Conyza canadensis
tgaattaccaccagcagcagtaactgcggcagtcaatggacgcatagcagttcctgcattcccaagaaaaagctgtatgtcatctttagcttctttacccacaggaaacacaccgccacaaccttccacaattgcccttttaattgcaacatcctcctcaacgtttagccctagagttcttaaagctccaagcatgtaat

SEQ ID NO: 1307 - DNA, 200 bp, Conyza canadensis
agttactgctgctggtggtaattcaaggtatttggacgttgtcattgactcattgctatagtaaatatatgttgacttgtgcacacaagatttgaagcatcttttaaacatatatgattagatacagagaacactgcatgttgaaaacttgaaatacaggactttcttaaaatattgggatttcacatatatgggttgaa

SEQ ID NO: 1308 - DNA, 200 bp, Conyza canadensis
ttcaacccatatatgtgaaatcccaatattttaagaaagtcctgtatttcaagttttcaacatgcagtgttctctgtatctaatcatatatgtttaaaagatgcttcaaatcttgtgtgcacaagtcaacatatatttactatagcaatgagtcaatgacaacgtccaaataccttgaattaccaccagcagcagtaact

SEQ ID NO: 1309 - DNA, 200 bp, Conyza canadensis
tgggatttcacatatatgggttgaatagttgaaatttcctccttctacctttaaccaattgtatattacttatttaaagttgtgttttaaacatggcgatatgattagatacagagaacactacttattgaaaggtttatgtggtatagtatgaattttaacctcaaaaagggtatctcactatctcttcatatagaagc

SEQ ID NO: 1310 - DNA, 200 bp, Conyza canadensis
gcttctatatgaagagatagtgagataccctttttgaggttaaaattcatactataccacataaacctttcaataagtagtgttctctgtatctaatcatatcgccatgtttaaaacacaactttaaataagtaatatacaattggttaaaggtagaaggaggaaatttcaactattcaacccatatatgtgaaatccca

SEQ ID NO: 1311 - DNA, 200 bp, Conyza canadensis
tctcactatctcttcatatagaagcacacatctgattctgttatatctttatggatcattttttccagctacatactagatggcgttcctcgtatgagagagagaccaataggtgatttggtcacgggtcttaagcagcttggggcagatgttgactgttctctcgggacgaactgccctcccgtgcgtgtagttggtgg

SEQ ID NO: 1312 - DNA, 200 bp, Conyza canadensis
ccaccaactacacgcacgggagggcagttcgtcccgagagaacagtcaacatctgccccaagctgcttaagacccgtgaccaaatcacctattggtctctctctcatacgaggaacgccatctagtatgtagctggaaaaaatgatccataaagatataacagaatcagatgtgtgcttctatatgaagagatagtgaga

SEQ ID NO: 1313 - DNA, 200 bp, Conyza canadensis
gccctcccgtgcgtgtagttggtggaggtggtctccctggaggaaaggtattgtgttttcattagtagttgttttctatgcaaatagcaacacaccttatatatcatccatttatagctatttttctaattggggcgtacgttactgtaatttgatcgtccaaccagttgtcatgaccctccttagctaaaatggatgaa

SEQ ID NO: 1314 - DNA, 200 bp, Conyza canadensis
ttcatccattttagctaaggagggtcatgacaactggttggacgatcaaattacagtaacgtacgccccaattagaaaaatagctataaatggatgatatataaggtgtgttgctatttgcatagaaaacaactactaatgaaaacacaatacctttcctccagggagaccacctccaccaactacacgcacgggagggc

SEQ ID NO: 1315 - DNA, 200 bp, Conyza canadensis
accctccttagctaaaatggatgaaagctggtccgacaattgaccataataaatgggtgtgggctatcttgctaaatttaagtatttcacttaaaatgagagttggtttacagtgtgcattcaacctaatttttttttttaacgtcgcatacaacctaaaattgaataatgttgtagacacaaaagctcttagtgagctt

SEQ ID NO: 1316 - DNA, 200 bp, Conyza canadensis
aagctcactaagagcttttgtgtctacaacattattcaattttaggttgtatgcgacgttaaaaaaaaaaattaggttgaatgcacactgtaaaccaactctcattttaagtgaaatacttaaatttagcaagatagcccacacccatttattatggtcaattgtcggaccagctttcatccattttagctaaggagggt

SEQ ID NO: 1317 - DNA, 200 bp, Conyza canadensis
agacacaaaagctcttagtgagctttaatagtaacattagaggtggtgatatcaatcaaacaataagggaaaagtaatatgtataaaaattagaattaaacaagaagttttaaaaaatagatcaaatggtttgaaagtcttctaaagtgtaatttaatgcataaatcttcctaaattattttatttaaaaactgtattgt

SEQ ID NO: 1318 - DNA, 200 bp, Conyza canadensis
acaatacagtttttaaataaaataatttaggaagatttatgcattaaattacactttagaagactttcaaaccatttgatctattttttaaaacttcttgtttaattctaatttttatacatattacttttcccttattgtttgattgatatcaccacctctaatgttactattaaagctcactaagagcttttgtgtct

SEQ ID NO: 1319 - DNA, 200 bp, Conyza canadensis
ttattttatttaaaaactgtattgtaatataattttcatcatcatatttgacattctatgaaaacaaatatacattttgaacaaacagtgttacggatcgacccaggcaattcaaagctgtccattctaacctaaaccagttttcacggttacctctattttcctgcctttcaatttgccagctacaagaagcttcattc

SEQ ID NO: 1320 - DNA, 200 bp, Conyza canadensis
gaatgaagcttcttgtagctggcaaattgaaaggcaggaaaatagaggtaaccgtgaaaactggtttaggttagaatggacagctttgaattgcctgggtcgatccgtaacactgtttgttcaaaatgtatatttgttttcatagaatgtcaaatatgatgatgaaaattatattacaatacagtttttaaataaaataa

SEQ ID NO: 1321 - DNA, 200 bp, Conyza canadensis
ttgccagctacaagaagcttcattccaccataacgggttcacgctaaagatgcaaagagtcatgattcgttatttattatcttgacttattatgataacaatagttttggtgtattttgatgtcttcaggttaagttgtcgggatctattagtagtcaataccttactgctctgcttatggcttctccccttgcccttgg

SEQ ID NO: 1322 - DNA, 200 bp, Conyza canadensis
ccaagggcaaggggagaagccataagcagagcagtaaggtattgactactaatagatcccgacaacttaacctgaagacatcaaaatacaccaaaactattgttatcataataagtcaagataataaataacgaatcatgactctttgcatctttagcgtgaacccgttatggtggaatgaagcttcttgtagctggcaa

SEQ ID NO: 1323 - DNA, 200 bp, Conyza canadensis
ttatggcttctccccttgcccttggggacgtggaaattgaaatcatagataaactaatttccataccatatgtcgagatgacactgaaattaatggaacggttcggcgtctcggtagaacatagtgatagttgggaccagttctttattcgaggcggccaaaagtacaagtaagtctatttctttctttttaaagtaaaa

SEQ ID NO: 1324 - DNA, 200 bp, Conyza canadensis
ttttactttaaaaagaaagaaatagacttacttgtacttttggccgcctcgaataaagaactggtcccaactatcactatgttctaccgagacgccgaaccgttccattaatttcagtgtcatctcgacatatggtatggaaattagtttatctatgatttcaatttccacgtccccaagggcaaggggagaagccataa

SEQ ID NO: 1325 - DNA, 200 bp, Conyza canadensis
ctatttctttctttttaaagtaaaactggaatttaaaaaggttgcagtttctaccctatctcttgtaatgggttgattcaggttatgtataatctctaatgggtcaaagggggtaaaatacaaaaaggttattttgtcaccaaaacgatatgatgcatattacctagttttcttattggaatagtaaacatttttaatca

SEQ ID NO: 1326 - DNA, 200 bp, Conyza canadensis
tgattaaaaatgtttactattccaataagaaaactaggtaatatgcatcatatcgttttggtgacaaaataacctttttgtattttaccccctttgacccattagagattatacataacctgaatcaacccattacaagagatagggtagaaactgcaacctttttaaattccagttttactttaaaaagaaagaaatag

SEQ ID NO: 1327 - DNA, 200 bp, Conyza canadensis
ttggaatagtaaacatttttaatcatttcaatgtacaactcttttatgtgtccacagaaattaaacatagcccctaggactatgttcatcatttccctttataaactagttggagaaaagtattttggccaacccattccgaatttacacattttggcctatcacccagcccgtctgtccactcattttcagggttttgt

SEQ ID NO: 1328 - DNA, 200 bp, Conyza canadensis
acaaaaccctgaaaatgagtggacagacgggctgggtgataggccaaaatgtgtaaattcggaatgggttggccaaaatacttttctccaactagtttataaagggaaatgatgaacatagtcctaggggctatgtttaatttctgtggacacataaaagagttgtacattgaaatgattaaaaatgtttactattccaa

SEQ ID NO: 1329 - DNA, 200 bp, Conyza canadensis
tgtccactcattttcagggttttgtatggagacccgtttgttaattagttggattaattatcttcaggtcacctggaaatgcttatgtagaaggtgatgcgtcaagtgcgagttacttcttggctggtgctgccataaccggaggcaccatcaccgttgaaggctgcggaacaagtagtctgcaggtgcactttgacctc

SEQ ID NO: 1330 - DNA, 200 bp, Conyza canadensis
gaggtcaaagtgcacctgcagactacttgttccgcagccttcaacggtgatggtgcctccggttatggcagcaccagccaagaagtaactcgcacttgacgcatcaccttctacataagcatttccaggtgacctgaagataattaatccaactaattaacaaacgggtctccatacaaaaccctgaaaatgagtggaca

SEQ ID NO: 1331 - DNA, 200 bp, Conyza canadensis
tagtctgcaggtgcactttgacctcctttgttttttattcttctcgatttcaatcaaacggctttacggttttacattttaaatggattttgtggaaacaacgagtattaaaagttcatcaaaagattttattattatttttatgcaacaattatcagcatctgtagtgaaatattcagaagtccgtttttagttcaaag

SEQ ID NO: 1332 - DNA, 200 bp, Conyza canadensis
ctttgaactaaaaacggacttctgaatatttcactacagatgctgataattgttgcataaaaataataataaaatcttttgatgaacttttaatactcgttgtttccacaaaatccatttaaaatgtaaaaccgtaaagccgtttgattgaaatcgagaagaataaaaaacaaaggaggtcaaagtgcacctgcagacta

SEQ ID NO: 1333 - DNA, 200 bp, Conyza canadensis
tcagaagtccgtttttagttcaaagtttttctttttaaccttaaagtcaaaagtgagatggcaaatcttttacgtaaaatgattcaattgaggctgtactttggtcgattctgacttaattgggaacataggttacgttagctataagcctataactataagtaagcatgtgtttatatgtcacaatgacttgattaaaa

SEQ ID NO: 1334 - DNA, 200 bp, Conyza canadensis
ttttaatcaagtcattgtgacatataaacacatgcttacttatagttataggcttatagctaacgtaacctatgttcccaattaagtcagaatcgaccaaagtacagcctcaattgaatcattttacgtaaaagatttgccatctcacttttgactttaaggttaaaaagaaaaactttgaactaaaaacggacttctga

SEQ ID NO: 1335 - DNA, 200 bp, Conyza canadensis
atatgtcacaatgacttgattaaaagtaaccttatgattttcttagtatacgttagtaatctaacagtatcataataacggacaaaaatgtgctggtggatcagcccacccagcccgttagaacatgacataaaaatgacccaacttgacctatcacctaagctcattataatatgttatccaacccaccctatcttggc

SEQ ID NO: 1336 - DNA, 200 bp, Conyza canadensis
gccaagatagggtgggttggataacatattataatgagcttaggtgataggtcaagttgggtcatttttatgtcatgttctaacgggctgggtgggctgatccaccagcacatttttgtccgttattatgatactgttagattactaacgtatactaagaaaatcataaggttacttttaatcaagtcattgtgacatat

SEQ ID NO: 1337 - DNA, 200 bp, Conyza canadensis
gttatccaacccaccctatcttggcacctgtgacctgtattcaaatgtatactgtaagcaacttcctgtttttcttaaacatgtattctgttttttctttccaatgaagggtgatgtgaagtttgcggaggtacttggacaaatgggtgcggaagtaacatggactgagaactcagtcacagttaagggcccaccaaggg

SEQ ID NO: 1338 - DNA, 200 bp, Conyza canadensis
cccttggtgggcccttaactgtgactgagttctcagtccatgttacttccgcacccatttgtccaagtacctccgcaaacttcacatcacccttcattggaaagaaaaaacagaatacatgtttaagaaaaacaggaagttgcttacagtatacatttgaatacaggtcacaggtgccaagatagggtgggttggataac

SEQ ID NO: 1339 - DNA, 200 bp, Conyza canadensis
gtcacagttaagggcccaccaagggattcttctggaaggaaacatttacgtgctgttgatgtgaacatgaacaagatgcctgatgttgccatgactcttgctgtggtcgctctttatgctgatggccctacagccattagagatggtatccttccttttaatgtggaaaaaagttcaacatgttttcactaagttttcaa

SEQ ID NO: 1340 - DNA, 200 bp, Conyza canadensis
ttgaaaacttagtgaaaacatgttgaacttttttccacattaaaaggaaggataccatctctaatggctgtagggccatcagcataaagagcgaccacagcaagagtcatggcaacatcaggcatcttgttcatgttcacatcaacagcacgtaaatgtttccttccagaagaatcccttggtgggcccttaactgtgac

SEQ ID NO: 1341 - DNA, 200 bp, Conyza canadensis
caacatgttttcactaagttttcaaagtaaatagatagatatgacttcaaaataactctattgccatgttaaatcttacacatattgcaagcacattctagtggtggtttggaatggcattatgaaattgaatatctaaaatatttaatttaaacatgttcggtttctgatcatttagggtcagttttaactgaatctca

SEQ ID NO: 1342 - DNA, 200 bp, Conyza canadensis
tgagattcagttaaaactgaccctaaatgatcagaaaccgaacatgtttaaattaaatattttagatattcaatttcataatgccattccaaaccaccactagaatgtgcttgcaatatgtgtaagatttaacatggcaatagagttattttgaagtcatatctatctatttactttgaaaacttagtgaaaacatgttg

SEQ ID NO: 1343 - DNA, 200 bp, Conyza canadensis
tagggtcagttttaactgaatctcagagaagtcgcgcaagacatgtcacatatttgtttctccgagtctcagacaactgctttttcaaaatgaaagcattctagaactattttgcttacagttgattttctaattctgggtgtacataaatcaagataattacttttataaaacacattcaaaaagcctcctagatgccc

SEQ ID NO: 1344 - DNA, 200 bp, Conyza canadensis
gggcatctaggaggctttttgaatgtgttttataaaagtaattatcttgatttatgtacacccagaattagaaaatcaactgtaagcaaaatagttctagaatgctttcattttgaaaaagcagttgtctgagactcggagaaacaaatatgtgacatgtcttgcgcgacttctctgagattcagttaaaactgacccta

SEQ ID NO: 1345 - DNA, 200 bp, Conyza canadensis
cattcaaaaagcctcctagatgcccctattatgaattttctgtttgctatacgagtatctgctttgtttttgaaaatggtttttttgttttttgccagttgctagctggagagttaaagaaaccgaaaggatgattgccatttgcacagaacttagaaaggtaaaatgatactttgttactctgtgatctatgatactgc

SEQ ID NO: 1346 - DNA, 200 bp, Conyza canadensis
gcagtatcatagatcacagagtaacaaagtatcattttacctttctaagttctgtgcaaatggcaatcatcctttcggtttctttaactctccagctagcaactggcaaaaaacaaaaaaaccattttcaaaaacaaagcagatactcgtatagcaaacagaaaattcataataggggcatctaggaggctttttgaatg

SEQ ID NO: 1347 - DNA, 200 bp, Conyza canadensis
gttactctgtgatctatgatactgctattgcttagaggtcactaaagtggtaaggtcaaataggatgggtttgaatgggaacacttttcgcccaaaacatatttaactaatataatttcacttgttactatctaatttcataaatgaaatgatttagaattagaatgttttgggtgtcttgcaacctattcattttaagc

SEQ ID NO: 1348 - DNA, 200 bp, Conyza canadensis
gcttaaaatgaataggttgcaagacacccaaaacattctaattctaaatcatttcatttatgaaattagatagtaacaagtgaaattatattagttaaatatgttttgggcgaaaagtgttcccattcaaacccatcctatttgaccttaccactttagtgacctctaagcaatagcagtatcatagatcacagagtaac

SEQ ID NO: 1349 - DNA, 200 bp, Conyza canadensis
gtcttgcaacctattcattttaagctattttaattgtcttttgacccattagaaatatacataagaaatatacttaatcagtcctctattgttaatgtttatctggggtgaaatttcttcagttgggagcaacagttgaagaaggtccggactattgtgtgatcactccgccagagaagttaaacgtgacagcaatagac

SEQ ID NO: 1350 - DNA, 200 bp, Conyza canadensis
gtctattgctgtcacgtttaacttctctggcggagtgatcacacaatagtccggaccttcttcaactgttgctcccaactgaagaaatttcaccccagataaacattaacaatagaggactgattaagtatatttcttatgtatatttctaatgggtcaaaagacaattaaaatagcttaaaatgaataggttgcaagac

SEQ ID NO: 1351 - DNA, 200 bp, Conyza canadensis
gaagttaaacgtgacagcaatagacacatatgatgatcacaggatggccatggctttctctcttgccgcttgtgcagatgttcctgtgaccattaaggatccttcttgcacacgtaagacgtttcctgattactttgaagttcttcaaagatttgccaagcattaatgtgattatgggtagtggtttgcttttctatatg

SEQ ID NO: 1352 - DNA, 200 bp, Conyza canadensis
catatagaaaagcaaaccactacccataatcacattaatgcttggcaaatctttgaagaacttcaaagtaatcaggaaacgtcttacgtgtgcaagaaggatccttaatggtcacaggaacatctgcacaagcggcaagagagaaagccatggccatcctgtgatcatcatatgtgtctattgctgtcacgtttaacttc

SEQ ID NO: 1353 - DNA, 200 bp, Conyza canadensis
gggtagtggtttgcttttctatatgtaatttttgtttcatttgtaacgagtaaaatgtgagttttgggcataacatattcttatgaacttgtattctttcgtaagatttttttagtgtaataaaatattttgctatttcagttgatgatttctattacggtaattatgcatctgacttccacttatactacgatgtgcat

SEQ ID NO: 1354 - DNA, 200 bp, Conyza canadensis
atgcacatcgtagtataagtggaagtcagatgcataattaccgtaatagaaatcatcaactgaaatagcaaaatattttattacactaaaaaaatcttacgaaagaatacaagttcataagaatatgttatgcccaaaactcacattttactcgttacaaatgaaacaaaaattacatatagaaaagcaaaccactaccc

SEQ ID NO: 1355 - DNA, 200 bp, Conyza canadensis
cttccacttatactacgatgtgcatggctttgcgtgaacagattgccaaacaatttagtcatgtggctggtttgattgcccacacttgttgagttgttggctagtcgagtttgggtgatcagaacccatgtggctcggtttacactttgcgccctaacatgtgtgttttaaaggttaattaaacttattaaacggcttag

SEQ ID NO: 1356 - DNA, 200 bp, Conyza canadensis
ctaagccgtttaataagtttaattaacctttaaaacacacatgttagggcgcaaagtgtaaaccgagccacatgggttctgatcacccaaactcgactagccaacaactcaacaagtgtgggcaatcaaaccagccacatgactaaattgtttggcaatctgttcacgcaaagccatgcacatcgtagtataagtggaag

SEQ ID NO: 1357 - DNA, 200 bp, Conyza canadensis
taattaaacttattaaacggcttagtaatttaagtcaataaaatcattcaagtttcttttgttcctttggaatgatttaagctaatatgaaaagggtacttttcttagacaaaagtcaaaatgtgaatatttactttcaaatgaactctggttatttacacgagaaatggggcatttttattttgatttttttaaaaaaa

SEQ ID NO: 1358 - DNA, 200 bp, Conyza canadensis
tttttttaaaaaaatcaaaataaaaatgccccatttctcgtgtaaataaccagagttcatttgaaagtaaatattcacattttgacttttgtctaagaaaagtacccttttcatattagcttaaatcattccaaaggaacaaaagaaacttgaatgattttattgacttaaattactaagccgtttaataagtttaatta

SEQ ID NO: 1359 - DNA, 200 bp, Conyza canadensis
ttttattttgatttttttaaaaaaagatctttcttatttgttatttattgtttagatagtataacacttcaaattaaactaaataaaaataaatacgacgagtagtaaacaagaagaaccaataggaacttcggcattttatgaagcccaaggtgcatgaacctttaagagcatattcttttatcatatttgtaggaaat

SEQ ID NO: 1360 - DNA, 200 bp, Conyza canadensis
atttcctacaaatatgataaaagaatatgctcttaaaggttcatgcaccttgggcttcataaaatgccgaagttcctattggttcttcttgtttactactcgtcgtatttatttttatttagtttaatttgaagtgttatactatctaaacaataaataacaaataagaaagatctttttttaaaaaaatcaaaataaaa

SEQ ID NO: 1361 - DNA, 200 bp, Conyza canadensis
ttcttttatcatatttgtaggaaattgtatacatacatacatacattataatattatattgtatatagagaagacaagttatatgtaccatttaagggaaggcatgggacaaggtgccaagattcataaacaaagagaacatggatgcctcgacttgtgactcaaattgctcacatgctttgcatcaatttgatgactta

SEQ ID NO: 1362 - DNA, 200 bp, Conyza canadensis
taagtcatcaaattgatgcaaagcatgtgagcaatttgagtcacaagtcgaggcatccatgttctctttgtttatgaatcttggcaccttgtcccatgccttcccttaaatggtacatataacttgtcttctctatatacaatataatattataatgtatgtatgtatgtatacaatttcctacaaatatgataaaagaa

SEQ ID NO: 1363 - DNA, 200 bp, Conyza canadensis
tgctttgcatcaatttgatgacttatatataatcttaacgtattataataaccttaaaagtgaaatttaacccatgcttatttttatacctttacaatcttgattataagttaagatcgaagcactttatgttttttgaaaatagtttttccatccaaagatcatctatgtgagtagggacgaaaccagaactttcactg

SEQ ID NO: 1364 - DNA, 200 bp, Conyza canadensis
cagtgaaagttctggtttcgtccctactcacatagatgatctttggatggaaaaactattttcaaaaaacataaagtgcttcgatcttaacttataatcaagattgtaaaggtataaaaataagcatgggttaaatttcacttttaaggttattataatacgttaagattatatataagtcatcaaattgatgcaaagca

SEQ ID NO: 1365 - DNA, 200 bp, Conyza canadensis
agggacgaaaccagaactttcactgtgagaggacaaatttagaaatcgtatgttatacttaagatcttaagctttttgatgtcttaaactagtcacttgcaaatgcatctactaaattatgtaaaagtagaacctcacttcaactttgtatttttaaaaaaaaattggtatttaaaaaataaggctagtaaatgttaata

SEQ ID NO: 1366 - DNA, 200 bp, Conyza canadensis
tattaacatttactagccttattttttaaataccaatttttttttaaaaatacaaagttgaagtgaggttctacttttacataatttagtagatgcatttgcaagtgactagtttaagacatcaaaaagcttaagatcttaagtataacatacgatttctaaatttgtcctctcacagtgaaagttctggtttcgtccct

SEQ ID NO: 1367 - DNA, 200 bp, Conyza canadensis
aaaataaggctagtaaatgttaatattaactaaaaaaatcctttaaaaataaatgtttagcttcatttaacaaatttgagattatgtttattctaaaaatatcagaaaggttaaatgctttgaaattttctattactttaatatttgtccataaattaaaaaacctatatataaaatataagggttaaaagggttttctt

SEQ ID NO: 1368 - DNA, 200 bp, Conyza canadensis
aagaaaacccttttaacccttatattttatatataggttttttaatttatggacaaatattaaagtaatagaaaatttcaaagcatttaacctttctgatatttttagaataaacataatctcaaatttgttaaatgaagctaaacatttatttttaaaggatttttttagttaatattaacatttactagccttatttt

SEQ ID NO: 1369 - DNA, 200 bp, Conyza canadensis
atataagggttaaaagggttttctttaaagtaaaagggtcaacataacaatctcaataaagttttgagatttaaaaggaaaaaatctaaaaggcaaggtaacttttgcaaatatgttgtcttcctcccttggtctctacaacagcaaagttacagcaccattaaaacacaaaatgctttatctattgatttatccattgt

SEQ ID NO: 1370 - DNA, 200 bp, Conyza canadensis
acaatggataaatcaatagataaagcattttgtgttttaatggtgctgtaactttgctgttgtagagaccaagggaggaagacaacatatttgcaaaagttaccttgccttttagattttttccttttaaatctcaaaactttattgagattgttatgttgacccttttactttaaagaaaacccttttaacccttatat

SEQ ID NO: 1371 - DNA, 200 bp, Conyza canadensis
ctttatctattgatttatccattgttactacaataataagctcttaatcgtataaagcatggttccgttatcacctatttaggcttttcattcttttttaaaaataaaatccaagtatactttaaaattaaaaaaaaataattagaatttagcaaaattggactgggggcagttgcccccattgcccgcatactaaatcc

SEQ ID NO: 1372 - DNA, 200 bp, Conyza canadensis
ggatttagtatgcgggcaatgggggcaactgcccccagtccaattttgctaaattctaattatttttttttaattttaaagtatacttggattttatttttaaaaaagaatgaaaagcctaaataggtgataacggaaccatgctttatacgattaagagcttattattgtagtaacaatggataaatcaatagataaag

SEQ ID NO: 1373 - DNA, 200 bp, Conyza canadensis
cccccattgcccgcatactaaatccgtccctgtatgagaggtaaaacatatttttcttgttattgcatatatatactacaaaaaaaaattcatttgtccacatttggttatcgaaattgtgaaaaaatttatgaatttaatcacatttaaaagtgtgtaaaaataatttacataaaatcacaatacttatacacttataa

SEQ ID NO: 1374 - DNA, 200 bp, Conyza canadensis
ttataagtgtataagtattgtgattttatgtaaattatttttacacacttttaaatgtgattaaattcataaattttttcacaatttcgataaccaaatgtggacaaatgaatttttttttgtagtatatatatgcaataacaagaaaaatatgttttacctctcatacagggacggatttagtatgcgggcaatggggg

SEQ ID NO: 1375 - DNA, 200 bp, Conyza canadensis
aatcacaatacttatacacttataaatgtgtaaacaaaatattaacacttaaaagtgtgaacaattgttaaatattttcatacttaaaagtgtgaaagtcaatttgtgacacatgatttcttcacaccctacgtgtataaagaaaataagtgttacaaattaactttcacactttaagtgtgaatacctctatattttta

SEQ ID NO: 1376 - DNA, 200 bp, Conyza canadensis
taaaaatatagaggtattcacacttaaagtgtgaaagttaatttgtaacacttattttctttatacacgtagggtgtgaagaaatcatgtgtcacaaattgactttcacacttttaagtatgaaaatatttaacaattgttcacacttttaagtgttaatattttgtttacacatttataagtgtataagtattgtgatt

SEQ ID NO: 1377 - DNA, 200 bp, Conyza canadensis
aagtgtgaatacctctatatttttacacacttaaaactatgaacttttctttttcacatgtataagtgtgtaaatattgtgattttttaaatttcttcacactttgaaatgtaaattatacacatttttaaatgtgattaaattaacaaaaatttttacaccttttaaaagtataaaaaaacaagtgtgaggaaatgata

SEQ ID NO: 1378 - DNA, 200 bp, Conyza canadensis
tatcatttcctcacacttgtttttttatacttttaaaaggtgtaaaaatttttgttaatttaatcacatttaaaaatgtgtataatttacatttcaaagtgtgaagaaatttaaaaaatcacaatatttacacacttatacatgtgaaaaagaaaagttcatagttttaagtgtgtaaaaatatagaggtattcacactt

SEQ ID NO: 1379 - DNA, 200 bp, Conyza canadensis
aaaaaacaagtgtgaggaaatgatatatttgttgtagtgataaaacaatgtaaatatcaatgatattatatcatatcacgaacatgacatgaaaaagataaattatcatattcttaatcggaattataaaaaaaaaaaaaacaaaaaacaaaaactatttctcccttacgcaattttattataaaattcttgcaaataca

SEQ ID NO: 1380 - DNA, 200 bp, Conyza canadensis
tgtatttgcaagaattttataataaaattgcgtaagggagaaatagtttttgttttttgttttttttttttttataattccgattaagaatatgataatttatctttttcatgtcatgttcgtgatatgatataatatcattgatatttacattgttttatcactacaacaaatatatcatttcctcacacttgtttttt

SEQ ID NO: 1381 - DNA, 200 bp, Conyza canadensis
ttattataaaattcttgcaaatacattaaactataaaaatattgatgaagagtcaagtgaccagtcccttacaatttaattaataatattaaaatcactaaatccctagtttttaaatgatgccttttcatttgtagtcacgttgtttgtaaaggtaatactttattaaaccttaagttagcaaaaaataattaaaacca

SEQ ID NO: 1382 - DNA, 200 bp, Conyza canadensis
tggttttaattattttttgctaacttaaggtttaataaagtattacctttacaaacaacgtgactacaaatgaaaaggcatcatttaaaaactagggatttagtgattttaatattattaattaaattgtaagggactggtcacttgactcttcatcaatatttttatagtttaatgtatttgcaagaattttataataa

SEQ ID NO: 1383 - DNA, 200 bp, Conyza canadensis
agttagcaaaaaataattaaaaccattcttgttatcatgtcattttcttaattattcaaaatataagcagtgatatagaattgttagattaattttgctattttaataataggaagaaatgtgtggtataaaattgtttttttctttttgtctttttaaaagtgttctaaattaattttttcatatatgtatatatatac

SEQ ID NO: 1384 - DNA, 200 bp, Conyza canadensis
gtatatatatacatatatgaaaaaattaatttagaacacttttaaaaagacaaaaagaaaaaaacaattttataccacacatttcttcctattattaaaatagcaaaattaatctaacaattctatatcactgcttatattttgaataattaagaaaatgacatgataacaagaatggttttaattattttttgctaact

SEQ ID NO: 1385 - DNA, 200 bp, Conyza canadensis
ttttttcatatatgtatatatatacaatattatttacaacaaatatacttattttattacataatatatataattatatataacatatacttttgtaaatgattataaattattgtaaatttattactccttagaatagaattattaagtgaaaaaatgcgacatatcatgtgagagttggatgccacatttagtgtcaa

SEQ ID NO: 1386 - DNA, 200 bp, Conyza canadensis
ttgacactaaatgtggcatccaactctcacatgatatgtcgcattttttcacttaataattctattctaaggagtaataaatttacaataatttataatcatttacaaaagtatatgttatatataattatatatattatgtaataaaataagtatatttgttgtaaataatattgtatatatatacatatatgaaaaaa

SEQ ID NO: 1387 - DNA, 200 bp, Conyza canadensis
agttggatgccacatttagtgtcaagttcacatgatcctcgagttttgtccaaccttctttacagataattccacagctacgccttttagatacgcatacaagagttttgtccaaccttttgtgaacaatttttcccccccttttaaacggtaaatacatttttataacataatgttaatggaacttaaactcgtaaatt

SEQ ID NO: 1388 - DNA, 200 bp, Conyza canadensis
aatttacgagtttaagttccattaacattatgttataaaaatgtatttaccgtttaaaagggggggaaaaattgttcacaaaaggttggacaaaactcttgtatgcgtatctaaaaggcgtagctgtggaattatctgtaaagaaggttggacaaaactcgaggatcatgtgaacttgacactaaatgtggcatccaact

SEQ ID NO: 1389 - DNA, 200 bp, Conyza canadensis
ttaatggaacttaaactcgtaaatttttggtatgtaccacatcaaatattattagattataaatgtcatttagtttgcgataatatatttttggtaacgatcattcaaaataattgatagaaacaaaaataaaataaaataaaatattgtgtttgctattcgtgaaaagaaatccgtggttcattataaggtaaacaatt

SEQ ID NO: 1390 - DNA, 200 bp, Conyza canadensis
aattgtttaccttataatgaaccacggatttcttttcacgaatagcaaacacaatattttattttattttatttttgtttctatcaattattttgaatgatcgttaccaaaaatatattatcgcaaactaaatgacatttataatctaataatatttgatgtggtacataccaaaaatttacgagtttaagttccattaa

SEQ ID NO: 1391 - DNA, 200 bp, Conyza canadensis
gtggttcattataaggtaaacaattatatgtgacttgacatatgctatacttcttaaatgacttggatgtattttgttattagatgagttatacttatacacttatatgccttgataatgccttgatattcataacacgcaacaagttactgcttataatttgtgaactacaaatttgactctccaactctccatagtga

SEQ ID NO: 1392 - DNA, 200 bp, Conyza canadensis
tcactatggagagttggagagtcaaatttgtagttcacaaattataagcagtaacttgttgcgtgttatgaatatcaaggcattatcaaggcatataagtgtataagtataactcatctaataacaaaatacatccaagtcatttaagaagtatagcatatgtcaagtcacatataattgtttaccttataatgaaccac

SEQ ID NO: 1393 - DNA, 200 bp, Conyza canadensis
ttgactctccaactctccatagtgatttaagaaattgattgatgatgaatatactttaaaattttacctattcatatagttataagaaaaaaagagtaagtgttatttattttgaacacaattttttttttaatacataaaatagtcaaatcgattattttcaagtgtgatatatgtgcatgttatctgattgacgtatc

SEQ ID NO: 1394 - DNA, 200 bp, Conyza canadensis
gatacgtcaatcagataacatgcacatatatcacacttgaaaataatcgatttgactattttatgtattaaaaaaaaaattgtgttcaaaataaataacacttactctttttttcttataactatatgaataggtaaaattttaaagtatattcatcatcaatcaatttcttaaatcactatggagagttggagagtcaa

SEQ ID NO: 1395 - DNA, 200 bp, Conyza canadensis
gtgcatgttatctgattgacgtatcaatgctagctaattaaacattaaattaaatatataaacttataaaggacttaggattgtacttgcataatatatatagttttaaaatgattcttctgatagttttatcatgtccaattgattttgttagttgttaaataataacaataatgataataataaaataaataaaataa

SEQ ID NO: 1396 - DNA, 200 bp, Conyza canadensis
ttattttatttattttattattatcattattgttattatttaacaactaacaaaatcaattggacatgataaaactatcagaagaatcattttaaaactatatatattatgcaagtacaatcctaagtcctttataagtttatatatttaatttaatgtttaattagctagcattgatacgtcaatcagataacatgcac

SEQ ID NO: 1397 - DNA, 200 bp, Conyza canadensis
gataataataaaataaataaaataaataaataataataataataataataataataatgtttaaggttgcaataacgtgtataaaaaattatatttatatatcaaaagttctctcttgaattttatgataaatgtacattttataacaaaatctttatctttatgaaaaataaaaaactaaattttgatatgattaaaaa

SEQ ID NO: 1398 - DNA, 200 bp, Conyza canadensis
tttttaatcatatcaaaatttagttttttatttttcataaagataaagattttgttataaaatgtacatttatcataaaattcaagagagaacttttgatatataaatataattttttatacacgttattgcaaccttaaacattattattattattattattattattatttatttattttatttattttattattatc

SEQ ID NO: 1399 - DNA, 200 bp, Conyza canadensis
aactaaattttgatatgattaaaaaaaaaaaaaatgttttagtatgttaggctcaactctcacgtgacatcaaagtcatcaataacttaagtttattttactgtacgaagtccctgcagattgttaaaggtgatcttaaattaaaagcgtaaaagatcaagtcttccatataataaccaatcacaccctaatttttttac

SEQ ID NO: 1400 - DNA, 200 bp, Conyza canadensis
gtaaaaaaattagggtgtgattggttattatatggaagacttgatcttttacgcttttaatttaagatcacctttaacaatctgcagggacttcgtacagtaaaataaacttaagttattgatgactttgatgtcacgtgagagttgagcctaacatactaaaacattttttttttttttaatcatatcaaaatttagtt

SEQ ID NO: 1401 - DNA, 200 bp, Conyza canadensis
accaatcacaccctaatttttttaccccaaaatcctaataaaattcatgaagatcttgaatattctttcccttttacacctcccccgtttgactttctttaaatgtatacttgagcttgattaatagtccaccctaataaaatctcaccattttcacaccacaattttatttcaaatcttctttcaaactttcactctct

SEQ ID NO: 1402 - DNA, 200 bp, Conyza canadensis
agagagtgaaagtttgaaagaagatttgaaataaaattgtggtgtgaaaatggtgagattttattagggtggactattaatcaagctcaagtatacatttaaagaaagtcaaacgggggaggtgtaaaagggaaagaatattcaagatcttcatgaattttattaggattttggggtaaaaaaattagggtgtgattggt

SEQ ID NO: 1403 - DNA, 200 bp, Conyza canadensis
atcttctttcaaactttcactctctgttcttcaccattctctctccaatcaacttttttctgcaaaccacaatcactcccctgttcaagaaacctcaagattccgccattatcaaaaagttttgttctttcttatcttgtttttacattccttacgccaagattcaaaacccacaaacctttcataaaacccaagtcacg

SEQ ID NO: 1404 - DNA, 200 bp, Conyza canadensis
cgtgacttgggttttatgaaaggtttgtgggttttgaatcttggcgtaaggaatgtaaaaacaagataagaaagaacaaaactttttgataatggcggaatcttgaggtttcttgaacaggggagtgattgtggtttgcagaaaaaagttgattggagagagaatggtgaagaacagagagtgaaagtttgaaagaagat

SEQ ID NO: 1405 - DNA, 200 bp, Conyza canadensis
aacctttcataaaacccaagtcacgtatcaagaatttagcacataaagttggcttcttttttcatcttcaagattacatctttttattcaagatttttgaacaagaatgaagctaatggatgaagatgaaaccccatcaactcctggtaaattcaaaatagataataataaatccatatacattcatcatagattcagat

SEQ ID NO: 1406 - DNA, 200 bp, Conyza canadensis
atctgaatctatgatgaatgtatatggatttattattatctattttgaatttaccaggagttgatggggtttcatcttcatccattagcttcattcttgttcaaaaatcttgaataaaaagatgtaatcttgaagatgaaaaaagaagccaactttatgtgctaaattcttgatacgtgacttgggttttatgaaaggtt

SEQ ID NO: 1407 - DNA, 200 bp, Conyza canadensis
atatacattcatcatagattcagatttctacattacaaatctttagccaaacttacattctggtcctttgttttcttgggcttaatcttggtttttttcttcaattcccaatcatcatcatcacaaattgtagatctttctagaagatctttaaaaacaagtacatggggtggacccatatgggaaaaacgggtcaaatc

SEQ ID NO: 1408 - DNA, 200 bp, Conyza canadensis
gatttgacccgtttttcccatatgggtccaccccatgtacttgtttttaaagatcttctagaaagatctacaatttgtgatgatgatgattgggaattgaagaaaaaaaccaagattaagcccaagaaaacaaaggaccagaatgtaagtttggctaaagatttgtaatgtagaaatctgaatctatgatgaatgtatat

SEQ ID NO: 1409 - DNA, 200 bp, Conyza canadensis
ccatatgggaaaaacgggtcaaatcatcagcccggatccgaacccgtaatgggatatccgtattagtcacaggtgcagccgggtttgtagggacacatgtcagtatggccttaaaacggcgtggtgatggtgttttaggtcttgataattttaatgactattatgatccgtcgctaaaaagagctagacagtctttgtta

SEQ ID NO: 1410 - DNA, 200 bp, Conyza canadensis
taacaaagactgtctagctctttttagcgacggatcataatagtcattaaaattatcaagacctaaaacaccatcaccacgccgttttaaggccatactgacatgtgtccctacaaacccggctgcacctgtgactaatacggatatcccattacgggttcggatccgggctgatgatttgacccgtttttcccatatgg

SEQ ID NO: 1411 - DNA, 200 bp, Conyza canadensis
aaaaagagctagacagtctttgttagataaaagtgggatttatatagttgaaggtgacttaaacgatgtcgttttgttaaaaaagttgtttgaattagtcccatttagtcatgttatgcatttggctgcacaagctggtgttagatatgctatgcaaaaccctagttcttatattcatagtaatattgctggttttgtta

SEQ ID NO: 1412 - DNA, 200 bp, Conyza canadensis
taacaaaaccagcaatattactatgaatataagaactagggttttgcatagcatatctaacaccagcttgtgcagccaaatgcataacatgactaaatgggactaattcaaacaacttttttaacaaaacgacatcgtttaagtcaccttcaactatataaatcccacttttatctaacaaagactgtctagctcttttt

SEQ ID NO: 1413 - DNA, 200 bp, Conyza canadensis
catagtaatattgctggttttgttaatctgttagaaatttgtaaaaatgctgaccctcaacctgctattgtttgggcttcatctagttcggtttacgggttaaatacgaaagtacccttttcagaaaaggaccggacggatcagcccgcgagtctttatgctgccacgaaaaaggcaggggaagaaatcgcgcatactta

SEQ ID NO: 1414 - DNA, 200 bp, Conyza canadensis
taagtatgcgcgatttcttcccctgcctttttcgtggcagcataaagactcgcgggctgatccgtccggtccttttctgaaaagggtactttcgtatttaacccgtaaaccgaactagatgaagcccaaacaatagcaggttgagggtcagcatttttacaaatttctaacagattaacaaaaccagcaatattactatg

SEQ ID NO: 1415 - DNA, 200 bp, Conyza canadensis
caggggaagaaatcgcgcatacttataatcatatatacgggctgtcattgacagggttgcgtttttttactgtttacgggccgtggggtaggccggatatggcgtatttcttttttacccgagacattttgaaagggaaaccgatacctatatttgaaggcccaaatcatggaacagtggctagagattttacgtatatt

SEQ ID NO: 1416 - DNA, 200 bp, Conyza canadensis
aatatacgtaaaatctctagccactgttccatgatttgggccttcaaatataggtatcggtttccctttcaaaatgtctcgggtaaaaaagaaatacgccatatccggcctaccccacggcccgtaaacagtaaaaaaacgcaaccctgtcaatgacagcccgtatatatgattataagtatgcgcgatttcttcccctg

SEQ ID NO: 1417 - DNA, 200 bp, Conyza canadensis
agtggctagagattttacgtatattgatgatatcgtaaaggggtgtttaggggcgttagatactgcagaaaagagtactgggagcggtgggaaaaagcgcgggccagcccagttacgggtttttaatttgggcaatacgtcgcctgtgcctgtttccgagctagttgggatattggaaaggttgttgaaggttaaggcga

SEQ ID NO: 1418 - DNA, 200 bp, Conyza canadensis
tcgccttaaccttcaacaacctttccaatatcccaactagctcggaaacaggcacaggcgacgtattgcccaaattaaaaacccgtaactgggctggcccgcgctttttcccaccgctcccagtactcttttctgcagtatctaacgcccctaaacacccctttacgatatcatcaatatacgtaaaatctctagccact

SEQ ID NO: 1419 - DNA, 200 bp, Conyza canadensis
gaaaggttgttgaaggttaaggcgaaacgaatggtgatgaaaatgccacgaaatggggatgtgcagtttacgcatgcgaatattagttttgcgaagagggagtttgggtataagccgacaacggatcttcaaagcgggttgaagaaatttgtgagatggtatgttagttactatggaacaggaaagaagactgatcactg

SEQ ID NO: 1420 - DNA, 200 bp, Conyza canadensis
cagtgatcagtcttctttcctgttccatagtaactaacataccatctcacaaatttcttcaacccgctttgaagatccgttgtcggcttatacccaaactccctcttcgcaaaactaatattcgcatgcgtaaactgcacatccccatttcgtggcattttcatcaccattcgtttcgccttaaccttcaacaacctttc

SEQ ID NO: 1421 - DNA, 200 bp, Conyza canadensis
gaacaggaaagaagactgatcactgatatgattaaaaaagatggaaatttgttacctaaaaaagactaaatttttttgtgttataattcttgttgatttggattctcatattgattgtttttcatgatatgatgatggtaattgtttgatacaaactatattgagactacaaaaggaatatattgttttagttcattatt

SEQ ID NO: 1422 - DNA, 200 bp, Conyza canadensis
aataatgaactaaaacaatatattccttttgtagtctcaatatagtttgtatcaaacaattaccatcatcatatcatgaaaaacaatcaatatgagaatccaaatcaacaagaattataacacaaaaaaatttagtcttttttaggtaacaaatttccatcttttttaatcatatcagtgatcagtcttctttcctgttc

SEQ ID NO: 1423 - DNA, 200 bp, Conyza canadensis
gaatatattgttttagttcattatttttgtgtgatgtgtactaataagtaagatttcacatatgtttttgtaggcttattgttttgtggatttcacgaaagttgagtataattcgttagatttctgatctttctgaactcgaatctggcaacattaatcacacgatcaaccacgcctgcttggatacaagcaccatacag

SEQ ID NO: 1424 - DNA, 200 bp, Conyza canadensis
ctgtatggtgcttgtatccaagcaggcgtggttgatcgtgtgattaatgttgccagattcgagttcagaaagatcagaaatctaacgaattatactcaactttcgtgaaatccacaaaacaataagcctacaaaaacatatgtgaaatcttacttattagtacacatcacacaaaaataatgaactaaaacaatatattc

SEQ ID NO: 1425 - DNA, 200 bp, Conyza canadensis
ctgcttggatacaagcaccatacagaaagtagtatcacgttgaaaatgtccattgttaccactgctttggggttttgcctaatgtccatgttttcattttcgttttttatcgatcttgaacgaatctaaagctaactttagaaaagaactgcagacgcttaacaaaccaacgttagttgttcaaatcggatcaaaatgaa

SEQ ID NO: 1426 - DNA, 200 bp, Conyza canadensis
ttcattttgatccgatttgaacaactaacgttggtttgttaagcgtctgcagttcttttctaaagttagctttagattcgttcaagatcgataaaaaacgaaaatgaaaacatggacattaggcaaaaccccaaagcagtggtaacaatggacattttcaacgtgatactactttctgtatggtgcttgtatccaagcag

SEQ ID NO: 1427 - DNA, 200 bp, Conyza canadensis
gttgttcaaatcggatcaaaatgaacattactggtttcaacccgattctttgtaaacagacattgcaaagagagttgatctgtccaggtagcaattgatatatttattatcacttaaaatcaattaaatgatggtttaatgtacatattttgcaagtcaataaattatgtgacattgtcacgagtacactaccaaacagt

SEQ ID NO: 1428 - DNA, 200 bp, Conyza canadensis
actgtttggtagtgtactcgtgacaatgtcacataatttattgacttgcaaaatatgtacattaaaccatcatttaattgattttaagtgataataaatatatcaattgctacctggacagatcaactctctttgcaatgtctgtttacaaagaatcgggttgaaaccagtaatgttcattttgatccgatttgaacaac

SEQ ID NO: 1429 - DNA, 200 bp, Conyza canadensis
tgtcacgagtacactaccaaacagttggatttgatgttgcttgtgagttgtacataatgcattaaagtatcttcatttggagatgtcgatttccgttatgaaaaacggttggtaagcttttatgtgcaagtatttaagagatgttaacacaatcttttgagttgtcacttaagagtgctaaaggagtttgtatatggtgg

SEQ ID NO: 1430 - DNA, 200 bp, Conyza canadensis
ccaccatatacaaactcctttagcactcttaagtgacaactcaaaagattgtgttaacatctcttaaatacttgcacataaaagcttaccaaccgtttttcataacggaaatcgacatctccaaatgaagatactttaatgcattatgtacaactcacaagcaacatcaaatccaactgtttggtagtgtactcgtgaca

SEQ ID NO: 1431 - DNA, 200 bp, Conyza canadensis
tgctaaaggagtttgtatatggtggaacttgtactatcaaatattagtttgtacatattttccctcaaattagtaattaaacgtcaatacttgaatttgaatacgggatttcctcatctcctctttagacaaaagttgtgcttttgatctacgtttgttgcttgaaagtcaaaaccattttttgttggagttgctaggga

SEQ ID NO: 1432 - DNA, 200 bp, Conyza canadensis
tccctagcaactccaacaaaaaatggttttgactttcaagcaacaaacgtagatcaaaagcacaacttttgtctaaagaggagatgaggaaatcccgtattcaaattcaagtattgacgtttaattactaatttgagggaaaatatgtacaaactaatatttgatagtacaagttccaccatatacaaactcctttagca

SEQ ID NO: 1433 - DNA, 200 bp, Conyza canadensis
cattttttgttggagttgctagggactgttatcatgggtcgtcatacataatcaaaagattgtgatctaatcgagatataaactttgtggtgttgaatgaaatgagccattgtttgtagaatcttagctttgttaccattgagtaagatcatcggataacaattttagcaaatcttggccatctcattaatatacgaaat

SEQ ID NO: 1434 - DNA, 200 bp, Conyza canadensis
atttcgtatattaatgagatggccaagatttgctaaaattgttatccgatgatcttactcaatggtaacaaagctaagattctacaaacaatggctcatttcattcaacaccacaaagtttatatctcgattagatcacaatcttttgattatgtatgacgacccatgataacagtccctagcaactccaacaaaaaatg

SEQ ID NO: 1435 - DNA, 200 bp, Conyza canadensis
tggccatctcattaatatacgaaataccattttttatgtaaaataattagttactacgtatatgtacttatcatacaatgaactgacagtaattaagttataaatttgatgtaggtttaggtaaaacctaagaaaagctatattgaatgtgcactttattatgtctagttcatgaacattaaaggagagtaacaaccctc

SEQ ID NO: 1436 - DNA, 200 bp, Conyza canadensis
gagggttgttactctcctttaatgttcatgaactagacataataaagtgcacattcaatatagcttttcttaggttttacctaaacctacatcaaatttataacttaattactgtcagttcattgtatgataagtacatatacgtagtaactaattattttacataaaaaatggtatttcgtatattaatgagatggcca

SEQ ID NO: 1437 - DNA, 200 bp, Conyza canadensis
aatctaataaaaagaaatttgtaaggaatttgtaagcggaaagtcccctttgtccattttgtaaagacaatgaggaaacaattgactatcttcttactgcttgtcccattgcaaatgtggtattatgtttcctcatggtgccatatacctccactataggcatactaggccaaagagtttttccttacaaaccagctttc

SEQ ID NO: 1438 - DNA, 200 bp, Conyza canadensis
gaaagctggtttgtaaggaaaaactctttggcctagtatgcctatagtggaggtatatggcaccatgaggaaacataataccacatttgcaatgggacaagcagtaagaagatagtcaattgtttcctcattgtctttacaaaatggacaaaggggactttccgcttacaaattccttacaaatttctttttattagatt

SEQ ID NO: 1439 - DNA, 200 bp, Conyza canadensis
agtttttccttacaaaccagctttctcccgaggtctcattaactaaacttagaatcattaatcttatcatcctctcatctggttggcatatttgaaaaactcggaaagataaagtcttttattgtaaagatctaaacccaaattcgaagacataaacattcaacactcatatggttaactgtgagatcaaagtttaagga

SEQ ID NO: 1440 - DNA, 200 bp, Conyza canadensis
tccttaaactttgatctcacagttaaccatatgagtgttgaatgtttatgtcttcgaatttgggtttagatctttacaataaaagactttatctttccgagtttttcaaatatgccaaccagatgagaggatgataagattaatgattctaagtttagttaatgagacctcgggagaaagctggtttgtaaggaaaaact

SEQ ID NO: 1441 - DNA, 200 bp, Conyza canadensis
taactgtgagatcaaagtttaaggagctcgactcgaactcctggagctcctttaattgtaatacggtaacttattttgactttggttttgcttgtactttcctaggacaaggagcctaaattttgattggagaaagagatacagtgagagtaggtatgtattttctaaaagacacgtaaacctcaaaaagagcgtgtggt

SEQ ID NO: 1442 - DNA, 200 bp, Conyza canadensis
accacacgctctttttgaggtttacgtgtcttttagaaaatacatacctactctcactgtatctctttctccaatcaaaatttaggctccttgtcctaggaaagtacaagcaaaaccaaagtcaaaataagttaccgtattacaattaaaggagctccaggagttcgagtcgagctccttaaactttgatctcacagtta

SEQ ID NO: 1443 - DNA, 200 bp, Conyza canadensis
gtaaacctcaaaaagagcgtgtggtaatgatagggattcttataacttattttgacattttgtaaaaaaaaatatttaaaaagaaagattaattgtcgaacctcatgacagacctaaaaaaccaaaactatatccaactaatctaaaaccttatttgttccataatcggtaaacgttctatcaatagtgtttatatgaag

SEQ ID NO: 1444 - DNA, 200 bp, Conyza canadensis
cttcatataaacactattgatagaacgtttaccgattatggaacaaataaggttttagattagttggatatagttttggttttttaggtctgtcatgaggttcgacaattaatctttctttttaaatatttttttttacaaaatgtcaaaataagttataagaatccctatcattaccacacgctctttttgaggtttac

SEQ ID NO: 1445 - DNA, 200 bp, Conyza canadensis
ttctatcaatagtgtttatatgaagtatacaaagttaagcattgccattgccactaatgatataacaatcttaaccattaattttcattcaatggtcaagatattttcaacatgacgcaagttgagaaatcaacttgagggaatttaaattccgtaaactcagctttatgtagaacaaggtgctgataacgtgtgataag

SEQ ID NO: 1446 - DNA, 200 bp, Conyza canadensis
cttatcacacgttatcagcaccttgttctacataaagctgagtttacggaatttaaattccctcaagttgatttctcaacttgcgtcatgttgaaaatatcttgaccattgaatgaaaattaatggttaagattgttatatcattagtggcaatggcaatgcttaactttgtatacttcatataaacactattgatagaa

SEQ ID NO: 1447 - DNA, 200 bp, Conyza canadensis
caaggtgctgataacgtgtgataagattattgtgaagagaaatatagagaggaagaaattgtatctttcattgagaatggggagggatatatatacacaagtcttggagtaggctccaagataaatgagataaactagaaaatgtaatctctctaaaacatacatgatacacataatcattttcatttacaataattcct

SEQ ID NO: 1448 - DNA, 200 bp, Conyza canadensis
aggaattattgtaaatgaaaatgattatgtgtatcatgtatgttttagagagattacattttctagtttatctcatttatcttggagcctactccaagacttgtgtatatatatccctccccattctcaatgaaagatacaatttcttcctctctatatttctcttcacaataatcttatcacacgttatcagcaccttg

SEQ ID NO: 1449 - DNA, 200 bp, Conyza canadensis
atcattttcatttacaataattcctttaataatagtcattgaaattaatagtgtcatctccattgaatgtttgacacctgtaaaaaaaaacgttatatattaatcatatacaaaaattaaacaaaatgtgacttttggaaggagtggctagaacacatgctaatgtttgagagattgagtgttcgaatttaggctgcgtt

SEQ ID NO: 1450 - DNA, 200 bp, Conyza canadensis
aacgcagcctaaattcgaacactcaatctctcaaacattagcatgtgttctagccactccttccaaaagtcacattttgtttaatttttgtatatgattaatatataacgtttttttttacaggtgtcaaacattcaatggagatgacactattaatttcaatgactattattaaaggaattattgtaaatgaaaatgat

SEQ ID NO: 1451 - DNA, 200 bp, Conyza canadensis
tgagtgttcgaatttaggctgcgtttttttatatgacctataagttttatacttttataagataaacacatatacactttgtaatatttttttctttttagtaacatttttgttcgtttattaaatatttgtctaactactgtatttcttttttacattttgttttactttatagtaggtaattttatttttaatacttt

SEQ ID NO: 1452 - DNA, 200 bp, Conyza canadensis
aaagtattaaaaataaaattacctactataaagtaaaacaaaatgtaaaaaagaaatacagtagttagacaaatatttaataaacgaacaaaaatgttactaaaaagaaaaaaatattacaaagtgtatatgtgtttatcttataaaagtataaaacttataggtcatataaaaaaacgcagcctaaattcgaacactca

SEQ ID NO: 1453 - DNA, 200 bp, Conyza canadensis
taggtaattttatttttaatactttgttttcttgggatttttaggaatacacatatggtatagttgtgacaaatgtatttgtattgatgtaaaggttacatttgatcaaatgtatagttgtgacaatatttaaacatgagaaaactacggcggtgaatttgtctactttaaaaatatgggttagtggggcgcggtcaatc

SEQ ID NO: 1454 - DNA, 200 bp, Conyza canadensis
gattgaccgcgccccactaacccatatttttaaagtagacaaattcaccgccgtagttttctcatgtttaaatattgtcacaactatacatttgatcaaatgtaacctttacatcaatacaaatacatttgtcacaactataccatatgtgtattcctaaaaatcccaagaaaacaaagtattaaaaataaaattaccta

SEQ ID NO: 1455 - DNA, 200 bp, Conyza canadensis
atgggttagtggggcgcggtcaatctttctagtttaaaaatatgggttggtaagatgtgtagcgggggcgggggttggtgaaggaaatgacactcttctaaaagccgcctaccaaactcccccaccatcacctcatcacccacctattcattgattcaaatcccacatttactacgtgttttctcaaccaaaatcccccc

SEQ ID NO: 1456 - DNA, 200 bp, Conyza canadensis
ggggggattttggttgagaaaacacgtagtaaatgtgggatttgaatcaatgaataggtgggtgatgaggtgatggtgggggagtttggtaggcggcttttagaagagtgtcatttccttcaccaacccccgcccccgctacacatcttaccaacccatatttttaaactagaaagattgaccgcgccccactaacccat

SEQ ID NO: 1457 - DNA, 200 bp, Conyza canadensis
gtgttttctcaaccaaaatcccccccgcccccccacaaaacacacaatggcagttcacatcaacaactccaacatacccattttcaacacttccaatctcacaacccaaaacccatcttcaaagtcatcatcttttttatcttttggatccaacttcaaaaacccattaaaaaacaataataacaataattatacctctg

SEQ ID NO: 1458 - DNA, 200 bp, Conyza canadensis
cagaggtataattattgttattattgttttttaatgggtttttgaagttggatccaaaagataaaaaagatgatgactttgaagatgggttttgggttgtgagattggaagtgttgaaaatgggtatgttggagttgttgatgtgaactgccattgtgtgttttgtgggggggcgggggggattttggttgagaaaacac

SEQ ID NO: 1459 - DNA, 200 bp, Conyza canadensis
aataataacaataattatacctctgtttcttgtaatgtgaaaaacaacaaaaacccatttaaagtatcagctttctctgccacttccaccaaagagaagccatctaaagctccagaagaaattgtgttgaaacccattcaagaaatttcgggtacggtccatttacccggatccaagtctttgtctaatcggatcctcct

SEQ ID NO: 1460 - DNA, 200 bp, Conyza canadensis
aggaggatccgattagacaaagacttggatccgggtaaatggaccgtacccgaaatttcttgaatgggtttcaacacaatttcttctggagctttagatggcttctctttggtggaagtggcagagaaagctgatactttaaatgggtttttgttgtttttcacattacaagaaacagaggtataattattgttattatt

SEQ ID NO: 1461 - DNA, 200 bp, Conyza canadensis
agtctttgtctaatcggatcctccttcttgctgccctgtctgaggtatcttttataaattatgttttgaatatttgaatttaattagtgttttgattgattgactagaatttgattattattaagatataggaaaagatatgtacattagtttttgactgaatgtgaaaaatgtcttaatgtagtaactcacaaagtttt

SEQ ID NO: 1462 - DNA, 200 bp, Conyza canadensis
aaaactttgtgagttactacattaagacatttttcacattcagtcaaaaactaatgtacatatcttttcctatatcttaataataatcaaattctagtcaatcaatcaaaacactaattaaattcaaatattcaaaacataatttataaaagatacctcagacagggcagcaagaaggaggatccgattagacaaagact

SEQ ID NO: 1463 - DNA, 200 bp, Conyza canadensis
ttaatgtagtaactcacaaagttttgtttgtgatctataagtttactttataaggttactctatgggaaaaggttacgtagattttggttttctttgacctctgtagttggtatggccatgagaagaagtaggcctaaaaagagctttgcttgtgagaggacatgaccatacttagaggactaggattagtttagaggaa

SEQ ID NO: 1464 - DNA, 200 bp, Conyza canadensis
ttcctctaaactaatcctagtcctctaagtatggtcatgtcctctcacaagcaaagctctttttaggcctacttcttctcatggccataccaactacagaggtcaaagaaaaccaaaatctacgtaaccttttcccatagagtaaccttataaagtaaacttatagatcacaaacaaaactttgtgagttactacattaa

SEQ ID NO: 1465 - DNA, 200 bp, Conyza canadensis
gaggactaggattagtttagaggaatatggtagatcagtaatccttttaggtattttaggggtagtctatatacttatatgtaggaaggtcaggcatgatacctttcttatatgctcgtatactcgtaattgttgctctcagtccatttgcttggttttatgcaaacggttatgtttattatgtttttatgctgatgtct

SEQ ID NO: 1466 - DNA, 200 bp, Conyza canadensis
agacatcagcataaaaacataataaacataaccgtttgcataaaaccaagcaaatggactgagagcaacaattacgagtatacgagcatataagaaaggtatcatgcctgaccttcctacatataagtatatagactacccctaaaatacctaaaaggattactgatctaccatattcctctaaactaatcctagtcctc

SEQ ID NO: 1467 - DNA, 200 bp, Conyza canadensis
ttattatgtttttatgctgatgtctaatatgttcaaatgtcctatctactatgtattgtccattttgcgctaaagtgtcctacgtggtatgtttgctactcccctttactcttaacgtaggcagctcatacccgaccgacaagtatggtttgcttaactctttacactctcctacttttgcatcatatggccggaggtcc

SEQ ID NO: 1468 - DNA, 200 bp, Conyza canadensis
ggacctccggccatatgatgcaaaagtaggagagtgtaaagagttaagcaaaccatacttgtcggtcgggtatgagctgcctacgttaagagtaaaggggagtagcaaacataccacgtaggacactttagcgcaaaatggacaatacatagtagataggacatttgaacatattagacatcagcataaaaacataataa

SEQ ID NO: 1469 - DNA, 200 bp, Conyza canadensis
atggaggtttggtaggaagtggtggtggtggtggttggtatgaaattttgtttttgaccttcttcaaacatccacctactactgacccctcccttcaaacccaacccaaaatccaaatcattaaatccttcaaacccactgtgtgttttgtgtgaaatttcacacacaacaaacaatggcagctactcacattaacacca

SEQ ID NO: 1470 - DNA, 200 bp, Conyza canadensis
tggtgttaatgtgagtagctgccattgtttgttgtgtgtgaaatttcacacaaaacacacagtgggtttgaaggatttaatgatttggattttgggttgggtttgaagggaggggtcagtagtaggtggatgtttgaagaaggtcaaaaacaaaatttcataccaaccaccaccaccaccacttcctaccaaacctccat

SEQ ID NO: 1471 - DNA, 200 bp, Conyza canadensis
atggcagctactcacattaacaccaccaacattgcccacaatctccaagctaccaccagtctttccaaaacccaaaccccatcaataaagtcacaaccttttttatcttttgggccaaaacacaaaaacccgattgcccatttctctgtttcttctaataataatagaaatcttggaaaaaatgtttaatagtttctgcc

SEQ ID NO: 1472 - DNA, 200 bp, Conyza canadensis
ggcagaaactattaaacattttttccaagatttctattattattagaagaaacagagaaatgggcaatcgggtttttgtgttttggcccaaaagataaaaaaggttgtgactttattgatggggtttgggttttggaaagactggtggtagcttggagattgtgggcaatgttggtggtgttaatgtgagtagctgccat

SEQ ID NO: 1473 - DNA, 200 bp, Conyza canadensis
gaaaaaatgtttaatagtttctgccgttgccaccaccgagaaaccgtcaacggtgccggaaattgtgttacaacccattaaagaaatctcgggtacggttaatttacccgggtccaagtcgttgtctaatcggatcctcctccttgctgcgcttgctgagggaacgaccattgttgacaacttactcaacagtgatgatg

SEQ ID NO: 1474 - DNA, 200 bp, Conyza canadensis
catcatcactgttgagtaagttgtcaacaatggtcgttccctcagcaagcgcagcaaggaggaggatccgattagacaacgacttggacccgggtaaattaaccgtacccgagatttctttaatgggttgtaacacaatttccggcaccgttgacggtttctcggtggtggcaacggcagaaactattaaacattttttc

SEQ ID NO: 1475 - DNA, 200 bp, Conyza canadensis
gacaacttactcaacagtgatgatgttcattacatgcttggagctttaagaactctagggctaaacgttgaggaggatgttgcaattaaaagggcaattgtggaaggttgtggcggtgtgtttcctgtgggtaaagaagctaaagatgacatacagctttttcttgggaatgcaggaactgctatgcgtccattgactgc

SEQ ID NO: 1476 - DNA, 200 bp, Conyza canadensis
gcagtcaatggacgcatagcagttcctgcattcccaagaaaaagctgtatgtcatctttagcttctttacccacaggaaacacaccgccacaaccttccacaattgcccttttaattgcaacatcctcctcaacgtttagccctagagttcttaaagctccaagcatgtaatgaacatcatcactgttgagtaagttgtc

SEQ ID NO: 1477 - DNA, 200 bp, Conyza canadensis
gaactgctatgcgtccattgactgccgcagttactgctgctggtggtaattcaagctacatactagatggcgttcctcgtatgagagagagaccaataggtgatttggtcacgggtcttaagcagcttggggcagatgttgactgttctctcgggacgaactgccctcccgtgcgtgtagttggtggaggtggtctccct

SEQ ID NO: 1478 - DNA, 200 bp, Conyza canadensis
agggagaccacctccaccaactacacgcacgggagggcagttcgtcccgagagaacagtcaacatctgccccaagctgcttaagacccgtgaccaaatcacctattggtctctctctcatacgaggaacgccatctagtatgtagcttgaattaccaccagcagcagtaactgcggcagtcaatggacgcatagcagttc

SEQ ID NO: 1479 - DNA, 200 bp, Conyza canadensis
tgtagttggtggaggtggtctccctggaggaaaggttaagttgtcgggatctattagtagtcaataccttactgctctgcttatggcttctccccttgcccttggggacgtggaaattgaaatcatagataaactaatttccataccatatgtcgagatgacactgaaattaatggaacggttcggcgtctcggtagaac

SEQ ID NO: 1480 - DNA, 200 bp, Conyza canadensis
gttctaccgagacgccgaaccgttccattaatttcagtgtcatctcgacatatggtatggaaattagtttatctatgatttcaatttccacgtccccaagggcaaggggagaagccataagcagagcagtaaggtattgactactaatagatcccgacaacttaacctttcctccagggagaccacctccaccaactaca

SEQ ID NO: 1481 - DNA, 200 bp, Conyza canadensis
gaacggttcggcgtctcggtagaacatagtgatagttgggaccagttctttattcgaggcggccaaaagtacaagtcacctggaaatgcttatgtagaaggtgatgcgtcaagtgcgagttacttcttggctggtgctgccataaccggaggcaccatcaccgttgaaggctgcggaacaagtagtctgcagggtgatgt

SEQ ID NO: 1482 - DNA, 200 bp, Conyza canadensis
acatcaccctgcagactacttgttccgcagccttcaacggtgatggtgcctccggttatggcagcaccagccaagaagtaactcgcacttgacgcatcaccttctacataagcatttccaggtgacttgtacttttggccgcctcgaataaagaactggtcccaactatcactatgttctaccgagacgccgaaccgttc

SEQ ID NO: 1483 - DNA, 200 bp, Conyza canadensis
gaacaagtagtctgcagggtgatgtgaagtttgcggaggtacttggacaaatgggtgcggaagtaacatggactgagaactcagtcacagttaagggcccaccaagggattcttctggaaggaaacatttacgtgctgttgatgtgaacatgaacaagatgcctgatgttgccatgactcttgctgtggtcgctctttat

SEQ ID NO: 1484 - DNA, 200 bp, Conyza canadensis
ataaagagcgaccacagcaagagtcatggcaacatcaggcatcttgttcatgttcacatcaacagcacgtaaatgtttccttccagaagaatcccttggtgggcccttaactgtgactgagttctcagtccatgttacttccgcacccatttgtccaagtacctccgcaaacttcacatcaccctgcagactacttgttc

SEQ ID NO: 1485 - DNA, 200 bp, Conyza canadensis
gactcttgctgtggtcgctctttatgctgatggccctacagccattagagatgttgctagctggagagttaaagaaaccgaaaggatgattgccatttgcacagaacttagaaagttgggagcaacagttgaagaaggtccggactattgtgtgatcactccgccagagaagttaaacgtgacagcaatagacacatatg

SEQ ID NO: 1486 - DNA, 200 bp, Conyza canadensis
catatgtgtctattgctgtcacgtttaacttctctggcggagtgatcacacaatagtccggaccttcttcaactgttgctcccaactttctaagttctgtgcaaatggcaatcatcctttcggtttctttaactctccagctagcaacatctctaatggctgtagggccatcagcataaagagcgaccacagcaagagtc

SEQ ID NO: 1487 - DNA, 200 bp, Conyza canadensis
aacgtgacagcaatagacacatatgatgatcacaggatggccatggctttctctcttgccgcttgtgcagatgttcctgtgaccattaaggatccttcttgcacacgtaagacgtttcctgattactttgaagttcttcaaagatttgccaagcattaatgtgattatgggtagtggtttgcttttctatatgtaatttt

SEQ ID NO: 1488 - DNA, 200 bp, Conyza canadensis
aaaattacatatagaaaagcaaaccactacccataatcacattaatgcttggcaaatctttgaagaacttcaaagtaatcaggaaacgtcttacgtgtgcaagaaggatccttaatggtcacaggaacatctgcacaagcggcaagagagaaagccatggccatcctgtgatcatcatatgtgtctattgctgtcacgtt

SEQ ID NO: 1489 - DNA, 200 bp, Conyza canadensis
atggcagttcacatcaacaactccaacatacccattttcaacacttccaatctcacaacccaaaacccatcttcaaagtcatcatcttttttatcttttgggtccaacttcaaaaacccattaagaaacaataataacaataattatacctctgtttcttgtaatgtgaaaaacaacaaaaacccatttaaagtatcagc

SEQ ID NO: 1490 - DNA, 200 bp, Conyza canadensis
gctgatactttaaatgggtttttgttgtttttcacattacaagaaacagaggtataattattgttattattgtttcttaatgggtttttgaagttggacccaaaagataaaaaagatgatgactttgaagatgggttttgggttgtgagattggaagtgttgaaaatgggtatgttggagttgttgatgtgaactgccat

SEQ ID NO: 1491 - DNA, 200 bp, Conyza canadensis
acaaaaacccatttaaagtatcagctttctctgccacttccaccaaagagaagccatctaaagctccagaagaaattgtgttgaaacccattcaagaaatttcgggtacggtccatttacccggatccaagtctttgtctaatcggatcctccttcttgctgccctgtctgaggggactactgttgtagacaacttgtta

SEQ ID NO: 1492 - DNA, 200 bp, Conyza canadensis
taacaagttgtctacaacagtagtcccctcagacagggcagcaagaaggaggatccgattagacaaagacttggatccgggtaaatggaccgtacccgaaatttcttgaatgggtttcaacacaatttcttctggagctttagatggcttctctttggtggaagtggcagagaaagctgatactttaaatgggtttttgt

SEQ ID NO: 1493 - DNA, 200 bp, Conyza canadensis
gactactgttgtagacaacttgttaaacagtgatgatgttcattacatgcttggagctttaagagctctagggttaaatgttgaagaaaatagtgcaattaaaagagcaatcgtagaaggttgtggtggtgtatttcccgtgggtaaagaagccaaggatgaaatccagctttttcttggaaatgcaggaacagctatgc

SEQ ID NO: 1494 - DNA, 200 bp, Conyza canadensis
gcatagctgttcctgcatttccaagaaaaagctggatttcatccttggcttctttacccacgggaaatacaccaccacaaccttctacgattgctcttttaattgcactattttcttcaacatttaaccctagagctcttaaagctccaagcatgtaatgaacatcatcactgtttaacaagttgtctacaacagtagtc

SEQ ID NO: 1495 - DNA, 200 bp, Conyza canadensis
cttggaaatgcaggaacagctatgcgtccattgactgctgccgttactgctgccggtggaaactcaagctacatactagatggtgttcctcgaatgagggagaggccaattggtgatctggtcaccggtctaaaacagcttggtgcaaatgttgattgttctctcggtacaaactgcccaccggttcgtgtagttggaag

SEQ ID NO: 1496 - DNA, 200 bp, Conyza canadensis
cttccaactacacgaaccggtgggcagtttgtaccgagagaacaatcaacatttgcaccaagctgttttagaccggtgaccagatcaccaattggcctctccctcattcgaggaacaccatctagtatgtagcttgagtttccaccggcagcagtaacggcagcagtcaatggacgcatagctgttcctgcatttccaag

SEQ ID NO: 1497 - DNA, 200 bp, Conyza canadensis
gcccaccggttcgtgtagttggaagtggaggccttcctggtggaaaggtgaaattgtcaggatctataagtagccaatacttgacttctttgcttatggcggctccccttgcactgggagacgtagagatagaaattatagataaattgatctctgtgccatatgtacggatgacactgaagttgatgcaacggtttggg

SEQ ID NO: 1498 - DNA, 200 bp, Conyza canadensis
cccaaaccgttgcatcaacttcagtgtcatccgtacatatggcacagagatcaatttatctataatttctatctctacgtctcccagtgcaaggggagccgccataagcaaagaagtcaagtattggctacttatagatcctgacaatttcacctttccaccaggaaggcctccacttccaactacacgaaccggtgggc

SEQ ID NO: 1499 - DNA, 200 bp, Conyza canadensis
actgaagttgatgcaacggtttggggtttcagtagaacacagtgatactttggacagattccatgtccgaggcggtcaaaagtacaagtcacctggaaatgcttatgtggaaggtgatgcttcaagtgcgagttacttcttagctggtgctgccatcactggcggaactgtcaccgtggaaggttgcgggacaagcagtt

SEQ ID NO: 1500 - DNA, 200 bp, Conyza canadensis
aactgcttgtcccgcaaccttccacggtgacagttccgccagtgatggcagcaccagctaagaagtaactcgcacttgaagcatcaccttccacataagcatttccaggtgacttgtacttttgaccgcctcggacatggaatctgtccaaagtatcactgtgttctactgaaaccccaaaccgttgcatcaacttcagt

SEQ ID NO: 1501 - DNA, 200 bp, Conyza canadensis
gtggaaggttgcgggacaagcagtttacagggtgatgtaaaatttgctgaggtccttggacaaatgggtgctgaagtaacctggacagagaactctgtcacggtgaagggtccgccaaggaattcttccggaaggggacacttgcgtccagtagatgtgaacatgaacaaaatgccggatgttgcgatgactcttgctgt

SEQ ID NO: 1502 - DNA, 200 bp, Conyza canadensis
acagcaagagtcatcgcaacatccggcattttgttcatgttcacatctactggacgcaagtgtccccttccggaagaattccttggcggacccttcaccgtgacagagttctctgtccaggttacttcagcacccatttgtccaaggacctcagcaaattttacatcaccctgtaaactgcttgtcccgcaaccttccac

SEQ ID NO: 1503 - DNA, 200 bp, Conyza canadensis
cggatgttgcgatgactcttgctgtggttgccctttatgctgatggccccactgccattagagacgtggctagctggagagtaaaagaaacggaaaggatgattgccatctgcacagaactaagaaagttgggagcaacagtcgaagaaggtccagattattgtgtgatcactccaccagagaaattgaatgtgacagca

SEQ ID NO: 1504 - DNA, 200 bp, Conyza canadensis
tgctgtcacattcaatttctctggtggagtgatcacacaataatctggaccttcttcgactgttgctcccaactttcttagttctgtgcagatggcaatcatcctttccgtttcttttactctccagctagccacgtctctaatggcagtggggccatcagcataaagggcaaccacagcaagagtcatcgcaacatccg

SEQ ID NO: 1505 - DNA, 200 bp, Conyza canadensis
accagagaaattgaatgtgacagcaatcgacacatacgatgatcacagaatggccatggctttctcgcttgccgcctgtgcagaggttcctgtcaccattaaggacccgggttgcacccgtaagaccttccccgactactttgaagttcttgaaagatacactaagcattaaatcacatataagatgttcagaaagaaag

SEQ ID NO: 1506 - DNA, 200 bp, Conyza canadensis
ctttctttctgaacatcttatatgtgatttaatgcttagtgtatctttcaagaacttcaaagtagtcggggaaggtcttacgggtgcaacccgggtccttaatggtgacaggaacctctgcacaggcggcaagcgagaaagccatggccattctgtgatcatcgtatgtgtcgattgctgtcacattcaatttctctggt

SEQ ID NO: 1507 - DNA, 200 bp, Conyza canadensis
caatttaggagtttactggttctcgaataccagcctatctttgttattgtttgatacaagccattggttcgtatcagaagtttagttgttttttgtctcaaaagttttcccctcatttttgaggtgattaggaaggaaaacttctcttccctctcatctcctttcctcccttaagttaactagacattaatgaatattgg

SEQ ID NO: 1508 - DNA, 200 bp, Conyza canadensis
ccaatattcattaatgtctagttaacttaagggaggaaaggagatgagagggaagagaagttttccttcctaatcacctcaaaaatgaggggaaaacttttgagacaaaaaacaactaaacttctgatacgaaccaatggcttgtatcaaacaataacaaagataggctggtattcgagaaccagtaaactcctaaattg

SEQ ID NO: 1509 - DNA, 200 bp, Conyza canadensis
ttaactagacattaatgaatattgggtcattttgttgttgtggctataaggaatgacttgacttaaaaacttatagaaatgctgtgttatccagtaagtaatcgtttttttactatttgtcttttaagaccattcattaagcacataaaacaaacaacaatcctgcttaatcgatgtagactacatacatgtagacggac

SEQ ID NO: 1510 - DNA, 200 bp, Conyza canadensis
gtccgtctacatgtatgtagtctacatcgattaagcaggattgttgtttgttttatgtgcttaatgaatggtcttaaaagacaaatagtaaaaaaacgattacttactggataacacagcatttctataagtttttaagtcaagtcattccttatagccacaacaacaaaatgacccaatattcattaatgtctagttaa

SEQ ID NO: 1511 - DNA, 200 bp, Conyza canadensis
gtagactacatacatgtagacggacattttatccataaaacagctaattagtcatacataccagttatatgttttacatcgtgcagtgtaaaacttctgcctttactgctaagattttttgtttacatatatattagatatattaaggtttgtattttgatgctaacatttaacattactttttttttttatcggggagt

SEQ ID NO: 1512 - DNA, 200 bp, Conyza canadensis
actccccgataaaaaaaaaaagtaatgttaaatgttagcatcaaaatacaaaccttaatatatctaatatatatgtaaacaaaaaatcttagcagtaaaggcagaagttttacactgcacgatgtaaaacatataactggtatgtatgactaattagctgttttatggataaaatgtccgtctacatgtatgtagtctac

SEQ ID NO: 1513 - DNA, 200 bp, Conyza canadensis
ttactttttttttttatcggggagtgggttaaagtggttcttctacctggttttagttttttagatgtatatccaatatttattgtgggtaatttaaagttttgaaatttttgtttttttttgtgaacagtataaagtttctgacttttttgattttttgtgaggtaaagtcgtgaatgtgtaatttggtatttgattga

SEQ ID NO: 1514 - DNA, 200 bp, Conyza canadensis
tcaatcaaataccaaattacacattcacgactttacctcacaaaaaatcaaaaaagtcagaaactttatactgttcacaaaaaaaaacaaaaatttcaaaactttaaattacccacaataaatattggatatacatctaaaaaactaaaaccaggtagaagaaccactttaacccactccccgataaaaaaaaaaagtaa

SEQ ID NO: 1515 - DNA, 200 bp, Conyza canadensis
aatgtgtaatttggtatttgattgatattcttgatattggtacatagtgaggtgcaaggtgctgatggtttcttagacgggtcatgtttgttttgtgtaaaatacatctgtttttttctttgataacaagttatagaagttgcacccaaaaatgttcttgttaaagcgataaaaatttggatagaaggtgacggttaatg

SEQ ID NO: 1516 - DNA, 200 bp, Conyza canadensis
cattaaccgtcaccttctatccaaatttttatcgctttaacaagaacatttttgggtgcaacttctataacttgttatcaaagaaaaaaacagatgtattttacacaaaacaaacatgacccgtctaagaaaccatcagcaccttgcacctcactatgtaccaatatcaagaatatcaatcaaataccaaattacacatt

SEQ ID NO: 1517 - DNA, 200 bp, Conyza canadensis
tttggatagaaggtgacggttaatgattcgatatattgatttgagtttccttttatctattgcattttcacaagttcaacattccaccctcgattttttgatgaatctatgactgaagaaaagggcgattgttgcctttggcaatcagttttggattttattttgtcatggaaagggggtgttagttcctgaaccttagt

SEQ ID NO: 1518 - DNA, 200 bp, Conyza canadensis
actaaggttcaggaactaacaccccctttccatgacaaaataaaatccaaaactgattgccaaaggcaacaatcgcccttttcttcagtcatagattcatcaaaaaatcgagggtggaatgttgaacttgtgaaaatgcaatagataaaaggaaactcaaatcaatatatcgaatcattaaccgtcaccttctatccaaa

SEQ ID NO: 1519 - DNA, 200 bp, Conyza canadensis
ggggtgttagttcctgaaccttagtagaagatgataagctatagtttcaatattgcttttctttcttgcatctgaactggttttgcatttttcaaaggactataaaagatgctatttatcacctatgacctatgttataaatagtaaggtattaaactattaatattggtatagtcttgagaaatccatgaatttcgatt

SEQ ID NO: 1520 - DNA, 200 bp, Conyza canadensis
aatcgaaattcatggatttctcaagactataccaatattaatagtttaataccttactatttataacataggtcataggtgataaatagcatcttttatagtcctttgaaaaatgcaaaaccagttcagatgcaagaaagaaaagcaatattgaaactatagcttatcatcttctactaaggttcaggaactaacacccc

SEQ ID NO: 1521 - DNA, 200 bp, Conyza canadensis
cttgagaaatccatgaatttcgattgagttcataggacacatctaacttatgtttctttacattacgatttacacatcttgtctttgacgtctgattttaaaatagcgtttctattgacattatgcatttctttgagttctctatataaatttttgtaagctttccatatgtatatactatgaatctgagtgaacttatg

SEQ ID NO: 1522 - DNA, 200 bp, Conyza canadensis
cataagttcactcagattcatagtatatacatatggaaagcttacaaaaatttatatagagaactcaaagaaatgcataatgtcaatagaaacgctattttaaaatcagacgtcaaagacaagatgtgtaaatcgtaatgtaaagaaacataagttagatgtgtcctatgaactcaatcgaaattcatggatttctcaag

SEQ ID NO: 1523 - DNA, 200 bp, Conyza canadensis
tactatgaatctgagtgaacttatgctatcaggggactactgttgtagacaacttgttaaacagtgatgatgttcattacatgcttggagctttaagagctctagggttaaatgttgaagaaaatagtgcaattaaaagagcaatcgtagaaggttgtggtggtgtatttcccgtgggtaaagaagccaaggatgaaatc

SEQ ID NO: 1524 - DNA, 200 bp, Conyza canadensis
gatttcatccttggcttctttacccacgggaaatacaccaccacaaccttctacgattgctcttttaattgcactattttcttcaacatttaaccctagagctcttaaagctccaagcatgtaatgaacatcatcactgtttaacaagttgtctacaacagtagtcccctgatagcataagttcactcagattcatagta

SEQ ID NO: 1525 - DNA, 200 bp, Conyza canadensis
gggtaaagaagccaaggatgaaatccagctttttcttggaaatgcaggaacagctatgcgtccattgactgctgccgttactgctgccggtggaaactcaaggtattttaacttagtgttatattctcctgcattttatgtctgcttcatcctcctacacatacatttcatgacatgtgtacccatttctctcacctcat

SEQ ID NO: 1526 - DNA, 200 bp, Conyza canadensis
atgaggtgagagaaatgggtacacatgtcatgaaatgtatgtgtaggaggatgaagcagacataaaatgcaggagaatataacactaagttaaaataccttgagtttccaccggcagcagtaacggcagcagtcaatggacgcatagctgttcctgcatttccaagaaaaagctggatttcatccttggcttctttaccc

SEQ ID NO: 1527 - DNA, 200 bp, Conyza canadensis
tgtgtacccatttctctcacctcatcatttcatttttctatgtgtcacaattatatgagtaggaggattcatactttcataggcataaattgtaggaatcaaatatcgtttctttttaacctaacatctcttgattagctattataatccgtagaacgtatattaaagttttttgtgccgatatgtaattttaaggtgaa

SEQ ID NO: 1528 - DNA, 200 bp, Conyza canadensis
ttcaccttaaaattacatatcggcacaaaaaactttaatatacgttctacggattataatagctaatcaagagatgttaggttaaaaagaaacgatatttgattcctacaatttatgcctatgaaagtatgaatcctcctactcatataattgtgacacatagaaaaatgaaatgatgaggtgagagaaatgggtacaca

SEQ ID NO: 1529 - DNA, 200 bp, Conyza canadensis
tgccgatatgtaattttaaggtgaatacacaaataaaaattttacctttctgtttgttgcatgttctgtacatataaatttttagtttttgttatatatctaagaatctaagatctctaaatattcttctattagttgacacaaattaagggatcacatgaactgaaaactcaatagcatccacttgttgataatgctgc

SEQ ID NO: 1530 - DNA, 200 bp, Conyza canadensis
gcagcattatcaacaagtggatgctattgagttttcagttcatgtgatcccttaatttgtgtcaactaatagaagaatatttagagatcttagattcttagatatataacaaaaactaaaaatttatatgtacagaacatgcaacaaacagaaaggtaaaatttttatttgtgtattcaccttaaaattacatatcggca

SEQ ID NO: 1531 - DNA, 200 bp, Conyza canadensis
agcatccacttgttgataatgctgcaatttaatgttccaaaaaagaaattattgcaattcttattatcattttatttatgggagacagtgagtatgaatttgggaatcgataatagagttgaccaacttggtggtgctgggtagctaaggtagtgggtaagttacattgatatgtaataccctaacagttatgagttttt

SEQ ID NO: 1532 - DNA, 200 bp, Conyza canadensis
aaaaactcataactgttagggtattacatatcaatgtaacttacccactaccttagctacccagcaccaccaagttggtcaactctattatcgattcccaaattcatactcactgtctcccataaataaaatgataataagaattgcaataatttcttttttggaacattaaattgcagcattatcaacaagtggatgct

SEQ ID NO: 1533 - DNA, 200 bp, Conyza canadensis
aataccctaacagttatgagttttttcttcagctacatactagatggtgttcctcgaatgagggagaggccaattggtgatctggtcaccggtctaaaacagcttggtgcaaatgttgattgttctctcggtacaaactgcccaccggttcgtgtagttggaagtggaggccttcctggtggaaaggtaatcaacaataa

SEQ ID NO: 1534 - DNA, 200 bp, Conyza canadensis
ttattgttgattacctttccaccaggaaggcctccacttccaactacacgaaccggtgggcagtttgtaccgagagaacaatcaacatttgcaccaagctgttttagaccggtgaccagatcaccaattggcctctccctcattcgaggaacaccatctagtatgtagctgaagaaaaaactcataactgttagggtatt

SEQ ID NO: 1535 - DNA, 200 bp, Conyza canadensis
ctggtggaaaggtaatcaacaataagattgctgcacttttaaagtcgtaagaattaattattcggttccatattggttttggcaaatttggttatttaagaaactattagatagtaatgaacttatagtttttgaatctttccgtaaccttttttccatgcccttcttattgcaggtgaaattgtcaggatctataagta

SEQ ID NO: 1536 - DNA, 200 bp, Conyza canadensis
tacttatagatcctgacaatttcacctgcaataagaagggcatggaaaaaaggttacggaaagattcaaaaactataagttcattactatctaatagtttcttaaataaccaaatttgccaaaaccaatatggaaccgaataattaattcttacgactttaaaagtgcagcaatcttattgttgattacctttccaccag

SEQ ID NO: 1537 - DNA, 200 bp, Conyza canadensis
gtgaaattgtcaggatctataagtagtgtatacttgacttctttgctcatggcagctccccttgcactgggagacgtagagatagaaattatagataaattgatctctgtgccatatgtacggatgacactgaagttgatgcaacggtttggggtttcagtagaacacagtgatactttggacagattccatgtccgagg

SEQ ID NO: 1538 - DNA, 200 bp, Conyza canadensis
cctcggacatggaatctgtccaaagtatcactgtgttctactgaaaccccaaaccgttgcatcaacttcagtgtcatccgtacatatggcacagagatcaatttatctataatttctatctctacgtctcccagtgcaaggggagctgccatgagcaaagaagtcaagtatacactacttatagatcctgacaatttcac

SEQ ID NO: 1539 - DNA, 200 bp, Conyza canadensis
ctttggacagattccatgtccgaggcggtcaaaagtacaagtaagttgatcattccataaaagtcaatctttacgtgaagatgggtcaacagctattttagtctgataaaatctctttaggtcgcctggaaatgcttatgtggaaagtgatgcttcaagtgcgagttacttcttagctggtgctgccatcactggcggaa

SEQ ID NO: 1540 - DNA, 200 bp, Conyza canadensis
ttccgccagtgatggcagcaccagctaagaagtaactcgcacttgaagcatcactttccacataagcatttccaggcgacctaaagagattttatcagactaaaatagctgttgacccatcttcacgtaaagattgacttttatggaatgatcaacttacttgtacttttgaccgcctcggacatggaatctgtccaaag

SEQ ID NO: 1541 - DNA, 200 bp, Conyza canadensis
gctggtgctgccatcactggcggaactgtcaccgtggaaggttgcgggacaagcagtttacaggtattatccatgtgcccacctcaaagatattcaaaaactaaattgtttctcaagtatatattcttctagttaattgcaaatttttttgccccatacgtctacccattctataaatttcgtccaaagttggtgactcg

SEQ ID NO: 1542 - DNA, 200 bp, Conyza canadensis
cgagtcaccaactttggacgaaatttatagaatgggtagacgtatggggcaaaaaaatttgcaattaactagaagaatatatacttgagaaacaatttagtttttgaatatctttgaggtgggcacatggataatacctgtaaactgcttgtcccgcaaccttccacggtgacagttccgccagtgatggcagcaccagc

SEQ ID NO: 1543 - DNA, 200 bp, Conyza canadensis
aatttcgtccaaagttggtgactcggttcaatcgtgtaataagtctcttttttgttttttagaattgacaatttatgtcagttcttggttatatcaacgatgtgggagtgtattgtgcacacattctaaaagaaggacatttagtctttttgctttctttttgcctcaagatcatcttcatcttttcaagatactctgca

SEQ ID NO: 1544 - DNA, 200 bp, Conyza canadensis
tgcagagtatcttgaaaagatgaagatgatcttgaggcaaaaagaaagcaaaaagactaaatgtccttcttttagaatgtgtgcacaatacactcccacatcgttgatataaccaagaactgacataaattgtcaattctaaaaaacaaaaaagagacttattacacgattgaaccgagtcaccaactttggacgaaatt

SEQ ID NO: 1545 - DNA, 200 bp, Conyza canadensis
cttcatcttttcaagatactctgcactcatttgcattatcaaagttttggatgcattctgtaactgtggtacaaggagggagacataatatgtcattagttcttattcttaagctcaatgcacactatcacctcttacttcttttttctttctttttttttattagtttatttaagctcaatgcacactaacacttcttc

SEQ ID NO: 1546 - DNA, 200 bp, Conyza canadensis
gaagaagtgttagtgtgcattgagcttaaataaactaataaaaaaaaagaaagaaaaaagaagtaagaggtgatagtgtgcattgagcttaagaataagaactaatgacatattatgtctccctccttgtaccacagttacagaatgcatccaaaactttgataatgcaaatgagtgcagagtatcttgaaaagatgaag

SEQ ID NO: 1547 - DNA, 200 bp, Conyza canadensis
gctcaatgcacactaacacttcttctttataacttcaagtcattcattttaatttttgaagctgatggtttttgacattaaagatagaactatgtatatacatatgtcatttcatcttacctatttgcatgtcttgttgatctttaatcagggtgatgtaaaatttgctgaggtccttggacaaatgggtgctgaagtaa

SEQ ID NO: 1548 - DNA, 200 bp, Conyza canadensis
ttacttcagcacccatttgtccaaggacctcagcaaattttacatcaccctgattaaagatcaacaagacatgcaaataggtaagatgaaatgacatatgtatatacatagttctatctttaatgtcaaaaaccatcagcttcaaaaattaaaatgaatgacttgaagttataaagaagaagtgttagtgtgcattgagc

SEQ ID NO: 1549 - DNA, 200 bp, Conyza canadensis
cttggacaaatgggtgctgaagtaacctggacagagaactctgtcacggtgaagggtccgccaaggaattcttccggaaggggacacttgcgtccagtagatgtgaacatgaacaaaatgccggatgttgcgatgactcttgctgtggttgccctttatgctgatggccccactgccattagagacggtatgtgttagaa

SEQ ID NO: 1550 - DNA, 200 bp, Conyza canadensis
ttctaacacataccgtctctaatggcagtggggccatcagcataaagggcaaccacagcaagagtcatcgcaacatccggcattttgttcatgttcacatctactggacgcaagtgtccccttccggaagaattccttggcggacccttcaccgtgacagagttctctgtccaggttacttcagcacccatttgtccaag

SEQ ID NO: 1551 - DNA, 200 bp, Conyza canadensis
ccattagagacggtatgtgttagaattcaccacagctttgtaatgttaaatatatgttagtttagattaacaaaatgactatatgatcacaaaaggaaacatttatctcaaatttggaactaatatagtatcatacctatatagcaattgtagtttcaaagaaatccttaaggtcgtgttgtttattatacatgactggg

SEQ ID NO: 1552 - DNA, 200 bp, Conyza canadensis
cccagtcatgtataataaacaacacgaccttaaggatttctttgaaactacaattgctatataggtatgatactatattagttccaaatttgagataaatgtttccttttgtgatcatatagtcattttgttaatctaaactaacatatatttaacattacaaagctgtggtgaattctaacacataccgtctctaatgg

SEQ ID NO: 1553 - DNA, 200 bp, Conyza canadensis
gtgttgtttattatacatgactgggtatatattgttttttgtgctcaagcttttaaaaatcacatttgactatcctttattgaaaggttaattttgttcatgtctcattttaggcaatttactttttatcaaggaaaaaatagcaatcaatgtctatgtcgtagtttaggcaattaaaacccatcaatcaaagtgctgtt

SEQ ID NO: 1554 - DNA, 200 bp, Conyza canadensis
aacagcactttgattgatgggttttaattgcctaaactacgacatagacattgattgctattttttccttgataaaaagtaaattgcctaaaatgagacatgaacaaaattaacctttcaataaaggatagtcaaatgtgatttttaaaagcttgagcacaaaaaacaatatatacccagtcatgtataataaacaacac

SEQ ID NO: 1555 - DNA, 200 bp, Conyza canadensis
aaaacccatcaatcaaagtgctgttggttcaaggcatattagagataaatgagataatagtacgtggatgtcttttcaaaagaagtacaaactttttcttgggctctttagtttttactgaaaataccaaactcctttaactgaattgtctaaaatagaagaaactggaaattagttgctattttgtgaaaacgaaaagt

SEQ ID NO: 1556 - DNA, 200 bp, Conyza canadensis
acttttcgttttcacaaaatagcaactaatttccagtttcttctattttagacaattcagttaaaggagtttggtattttcagtaaaaactaaagagcccaagaaaaagtttgtacttcttttgaaaagacatccacgtactattatctcatttatctctaatatgccttgaaccaacagcactttgattgatgggtttt

SEQ ID NO: 1557 - DNA, 200 bp, Conyza canadensis
ttgctattttgtgaaaacgaaaagtaaatcgccaaaaattggaggttaagtatgcttatattttatgtaattcatctttttgaaaaatgtaagaacttaaatggaagtgaattgatttgaaaaatatatattaaagcaccacttatgaagaaatctagaaattgagttttaggatctgtaaagacatcctgtatattgta

SEQ ID NO: 1558 - DNA, 200 bp, Conyza canadensis
tacaatatacaggatgtctttacagatcctaaaactcaatttctagatttcttcataagtggtgctttaatatatatttttcaaatcaattcacttccatttaagttcttacatttttcaaaaagatgaattacataaaatataagcatacttaacctccaatttttggcgatttacttttcgttttcacaaaatagcaa

SEQ ID NO: 1559 - DNA, 200 bp, Conyza canadensis
ctgtaaagacatcctgtatattgtatgagaatagatatatcgtacaccacaatccatcatttttacttttcacacgacaaagtgaatatgaaaaatgtgagttaaaacacttaaaagacagttttgggtgtgcaaagtaaaatgtagcacaaattggcccctttctcatattgggtttacatattcttctttacgtatat

SEQ ID NO: 1560 - DNA, 200 bp, Conyza canadensis
atatacgtaaagaagaatatgtaaacccaatatgagaaaggggccaatttgtgctacattttactttgcacacccaaaactgtcttttaagtgttttaactcacatttttcatattcactttgtcgtgtgaaaagtaaaaatgatggattgtggtgtacgatatatctattctcatacaatatacaggatgtctttacag

SEQ ID NO: 1561 - DNA, 200 bp, Conyza canadensis
tttacatattcttctttacgtatatccctatattgttcattttgtgggccccatctcacgtcggtaaatcattagatggactaaatcatattcttcattccttatattgggcagtggctagctggagagtaaaagaaacggaaaggatgattgccatctgcacagaactaagaaaggtacaagtcattaacccatcttac

SEQ ID NO: 1562 - DNA, 200 bp, Conyza canadensis
gtaagatgggttaatgacttgtacctttcttagttctgtgcagatggcaatcatcctttccgtttcttttactctccagctagccactgcccaatataaggaatgaagaatatgatttagtccatctaatgatttaccgacgtgagatggggcccacaaaatgaacaatatagggatatacgtaaagaagaatatgtaaa

SEQ ID NO: 1563 - DNA, 200 bp, Conyza canadensis
ggtacaagtcattaacccatcttactctaaaaaatagaatggccatgagtacttttaaagtactcaatgaatctgcccattatttgtttagtgctaataggcccttttgcccttggaacttttcagttgggagcaacagtcgaagaaggtccagattattgtgtgatcactccaccagagaaattgaatgtgacagcaat

SEQ ID NO: 1564 - DNA, 200 bp, Conyza canadensis
attgctgtcacattcaatttctctggtggagtgatcacacaataatctggaccttcttcgactgttgctcccaactgaaaagttccaagggcaaaagggcctattagcactaaacaaataatgggcagattcattgagtactttaaaagtactcatggccattctattttttagagtaagatgggttaatgacttgtacc

SEQ ID NO: 1565 - DNA, 200 bp, Conyza canadensis
cagagaaattgaatgtgacagcaatcgacacatacgatgatcacagaatggccatggctttctcgcttgccgcctgtgcagaggttcctgtcaccattaaggacccgggttgcacccgtaagaccttccccgactactttgaagttcttgaaagatacactaagcattaaatcacatataagatgttcagaaagaaaggg

SEQ ID NO: 1566 - DNA, 200 bp, Conyza canadensis
ccctttctttctgaacatcttatatgtgatttaatgcttagtgtatctttcaagaacttcaaagtagtcggggaaggtcttacgggtgcaacccgggtccttaatggtgacaggaacctctgcacaggcggcaagcgagaaagccatggccattctgtgatcatcgtatgtgtcgattgctgtcacattcaatttctctg

SEQ ID NO: 1567 - DNA, 200 bp, Conyza canadensis
atataagatgttcagaaagaaaggggttagaggttttaaaatgacacctttacccttcagtccttcaccattatctttcttcagaaatgtttcacttacagagttacatcatatgtatatgggcgacctgagcgtattttatcttttcttttcggtgagtttgtagtttttgttgaggtggaataagtattatcttgaat

SEQ ID NO: 1568 - DNA, 200 bp, Conyza canadensis
attcaagataatacttattccacctcaacaaaaactacaaactcaccgaaaagaaaagataaaatacgctcaggtcgcccatatacatatgatgtaactctgtaagtgaaacatttctgaagaaagataatggtgaaggactgaagggtaaaggtgtcattttaaaacctctaacccctttctttctgaacatcttatat

SEQ ID NO: 1569 - DNA, 200 bp, Conyza canadensis
aggtggaataagtattatcttgaatatttatgctaaatttggttagcaatgtattatttttgatgcataatgtatttgttatattataatgaaaagtgtttttgaatatggccaagatttgtgaaggtgagatgagttttgaaccttatactcagatttagcacatggtgacactaaataattgatcctttattagtgct

SEQ ID NO: 1570 - DNA, 200 bp, Conyza canadensis
agcactaataaaggatcaattatttagtgtcaccatgtgctaaatctgagtataaggttcaaaactcatctcaccttcacaaatcttggccatattcaaaaacacttttcattataatataacaaatacattatgcatcaaaaataatacattgctaaccaaatttagcataaatattcaagataatacttattccacct

SEQ ID NO: 1571 - DNA, 200 bp, Conyza canadensis
aaataattgatcctttattagtgctgaaaataattatatgttaagaaagattggttactaacaaaagtggttatgagtgaaagtggggtttaagtttgaagtcataattctcttgagatgttgatttgaagttgagatgtacgataggggtgtaaaggcacctttgggatataaacaaaatcatggattatcttattcct

SEQ ID NO: 1572 - DNA, 200 bp, Conyza canadensis
aggaataagataatccatgattttgtttatatcccaaaggtgcctttacacccctatcgtacatctcaacttcaaatcaacatctcaagagaattatgacttcaaacttaaaccccactttcactcataaccacttttgttagtaaccaatctttcttaacatataattattttcagcactaataaaggatcaattattt

SEQ ID NO: 1573 - DNA, 200 bp, Conyza canadensis
caaaatcatggattatcttattccttatacttctattgtatgttaatttttaattcaattttactgaattacttaaatgatattttgaatactataaaaggttggtattactccatatgttatatgagtcagaaatacatttcgtaatttgctctacattatcttaagtaatatttctcttctaaatccaaattactagt

SEQ ID NO: 1574 - DNA, 200 bp, Conyza canadensis
actagtaatttggatttagaagagaaatattacttaagataatgtagagcaaattacgaaatgtatttctgactcatataacatatggagtaataccaaccttttatagtattcaaaatatcatttaagtaattcagtaaaattgaattaaaaattaacatacaatagaagtataaggaataagataatccatgattttg

SEQ ID NO: 1575 - DNA, 200 bp, Conyza canadensis
tctcttctaaatccaaattactagttaataatatatactagtaaaaatgtagctataagcctataactaaaacctgaaaaatgaaaaagaaaataaacgctatataaattatggattcatgcatgtatctattatataaataaaagaaaattgtgatgacatcatatttattagaaaaaaatctacttggcatcattaga

SEQ ID NO: 1576 - DNA, 200 bp, Conyza canadensis
tctaatgatgccaagtagatttttttctaataaatatgatgtcatcacaattttcttttatttatataatagatacatgcatgaatccataatttatatagcgtttattttctttttcatttttcaggttttagttataggcttatagctacatttttactagtatatattattaactagtaatttggatttagaagaga

SEQ ID NO: 1577 - DNA, 200 bp, Conyza canadensis
aaaaaatctacttggcatcattagacattcacatattaattatttattttttttatttaattgatttatgacatcaatataaataaatagaatttgataattctatattaggaaatatcattacttttaaagattttgtggcactattactctattagacatttatataataatactttctttttttatttaattgattt

SEQ ID NO: 1578 - DNA, 200 bp, Conyza canadensis
aaatcaattaaataaaaaaagaaagtattattatataaatgtctaatagagtaatagtgccacaaaatctttaaaagtaatgatatttcctaatatagaattatcaaattctatttatttatattgatgtcataaatcaattaaataaaaaaaataaataattaatatgtgaatgtctaatgatgccaagtagatttttt

SEQ ID NO: 1579 - DNA, 200 bp, Conyza canadensis
ctttctttttttatttaattgatttatttataaataactaaactttaatttttaattcccatattagaaaatatctttagttttaaagatttttgtgtggtaacggttataacttaaatgttcatagagtattataaatgaatatgaaaggtcttacacattttaattcttatatagattgtatatgtgtttataaaaaa

SEQ ID NO: 1580 - DNA, 200 bp, Conyza canadensis
ttttttataaacacatatacaatctatataagaattaaaatgtgtaagacctttcatattcatttataatactctatgaacatttaagttataaccgttaccacacaaaaatctttaaaactaaagatattttctaatatgggaattaaaaattaaagtttagttatttataaataaatcaattaaataaaaaaagaaag

SEQ ID NO: 1581 - DNA, 200 bp, Conyza canadensis
agattgtatatgtgtttataaaaaaaatcacattttgtacaatatcttgaagtttttcttgaattttattaaattttgtgttatatatcaatgggttgaatgttaaataaattttcattatataattttaggtaaattttacattatataattgtcctcaataattatttctttagtttgcccgcgtaatacgcgggtta

SEQ ID NO: 1582 - DNA, 200 bp, Conyza canadensis
taacccgcgtattacgcgggcaaactaaagaaataattattgaggacaattatataatgtaaaatttacctaaaattatataatgaaaatttatttaacattcaacccattgatatataacacaaaatttaataaaattcaagaaaaacttcaagatattgtacaaaatgtgattttttttataaacacatatacaatct

SEQ ID NO: 1583 - DNA, 200 bp, Conyza canadensis
gtttgcccgcgtaatacgcgggttacttagctagtcaagtgataaagttccatttaggtaaaaactaaaaaacatgatagaagagtttacgttaattgtattatttatctaaaaattctatttttagtttcgtaagtttagactgatcgatcatcttgcaactcgatgttatacatggcattttatcttaaaaactttta

SEQ ID NO: 1584 - DNA, 200 bp, Conyza canadensis
taaaagtttttaagataaaatgccatgtataacatcgagttgcaagatgatcgatcagtctaaacttacgaaactaaaaatagaatttttagataaataatacaattaacgtaaactcttctatcatgttttttagtttttacctaaatggaactttatcacttgactagctaagtaacccgcgtattacgcgggcaaac

SEQ ID NO: 1585 - DNA, 200 bp, Conyza canadensis
tggcattttatcttaaaaacttttacccttgtatttttttttttttttttattgtttttctttaaacattcatatctataatcatgaaaagaaataaaataagaattagcgataagccagataaatacaaaaggagaaatttaagtacaaatgaaattttatttcatcttatggtacaatgtaataaaaagttataggaa

SEQ ID NO: 1586 - DNA, 200 bp, Conyza canadensis
ttcctataactttttattacattgtaccataagatgaaataaaatttcatttgtacttaaatttctccttttgtatttatctggcttatcgctaattcttattttatttcttttcatgattatagatatgaatgtttaaagaaaaacaataaaaaaaaaaaaaaaaatacaagggtaaaagtttttaagataaaatgcca

SEQ ID NO: 1587 - DNA, 200 bp, Conyza canadensis
acaatgtaataaaaagttataggaaaatttaacttcagtcctaagattgttgttagcgtgaataaataattatactttttattttaaaattagtttgagcgcgttaagtcgttattggcaacccatagagttgttattagcaatactaaattttttaattgtggatagccaaaattaaatggatgggaatttccaatgac

SEQ ID NO: 1588 - DNA, 200 bp, Conyza canadensis
gtcattggaaattcccatccatttaattttggctatccacaattaaaaaatttagtattgctaataacaactctatgggttgccaataacgacttaacgcgctcaaactaattttaaaataaaaagtataattatttattcacgctaacaacaatcttaggactgaagttaaattttcctataactttttattacattgt

SEQ ID NO: 1589 - DNA, 200 bp, Conyza canadensis
taaatggatgggaatttccaatgacacaccggtctagtgttaagacacatgagattttcttataagtcggaagttcgagtcttgtcaagtacaagctttattcatattaatccccaagtagtctatggtgatttcttttggcattgttgctcggcacggggtagtaggatccggtttagacaaccgaccaaccgcttttt

SEQ ID NO: 1590 - DNA, 200 bp, Conyza canadensis
aaaaagcggttggtcggttgtctaaaccggatcctactaccccgtgccgagcaacaatgccaaaagaaatcaccatagactacttggggattaatatgaataaagcttgtacttgacaagactcgaacttccgacttataagaaaatctcatgtgtcttaacactagaccggtgtgtcattggaaattcccatccattta

SEQ ID NO: 1591 - DNA, 200 bp, Conyza canadensis
ttagacaaccgaccaaccgctttttgggttaggacctcatcatttgatggtgaaggatatgtttctattcgaaagtcatttgttaaaaaataataaaaatgaataaatgaacggaaattatatgcaccataaccttagaatatactaccaatattccaggtttatacttgtgacttgccaacatttattgttgttgattg

SEQ ID NO: 1592 - DNA, 200 bp, Conyza canadensis
caatcaacaacaataaatgttggcaagtcacaagtataaacctggaatattggtagtatattctaaggttatggtgcatataatttccgttcatttattcatttttattattttttaacaaatgactttcgaatagaaacatatccttcaccatcaaatgatgaggtcctaacccaaaaagcggttggtcggttgtctaa

SEQ ID NO: 1593 - DNA, 200 bp, Conyza canadensis
tgccaacatttattgttgttgattgtaataatgctcatgtttccttcattcttcttgtatagttccttgaaaaaatttcttgttgttgattgtaactacaatgattaatgtagaagaaacaatggttaaaaaaaaaatgatatttgtaccatttcttttgattgatgtatcataaatgtgcattgttaacttgtacagtt

SEQ ID NO: 1594 - DNA, 200 bp, Conyza canadensis
aactgtacaagttaacaatgcacatttatgatacatcaatcaaaagaaatggtacaaatatcattttttttttaaccattgtttcttctacattaatcattgtagttacaatcaacaacaagaaattttttcaaggaactatacaagaagaatgaaggaaacatgagcattattacaatcaacaacaataaatgttggca

SEQ ID NO: 1595 - DNA, 200 bp, Conyza canadensis
atgtgcattgttaacttgtacagttagttatacaatttgtacattattatacattaataaaaaatagtgatactaatatcacaaattaagcgttaaaacagtgtggggtggggtctaaaagactaactcagtaatttatgatacttggaaattactcttttcccaattaagcttgcaataagttgaagtttggtggtgta

SEQ ID NO: 1596 - DNA, 200 bp, Conyza canadensis
tacaccaccaaacttcaacttattgcaagcttaattgggaaaagagtaatttccaagtatcataaattactgagttagtcttttagaccccaccccacactgttttaacgcttaatttgtgatattagtatcactattttttattaatgtataataatgtacaaattgtataactaactgtacaagttaacaatgcacat

SEQ ID NO: 1597 - DNA, 200 bp, Conyza canadensis
caataagttgaagtttggtggtgtagtagccagcctttttactcttttcacatatatacaaactcacatgatgtaggtgctaccctaaccaacaaagttggggaattttgacaataaaggcattgagtgtttacctaatttacagtcaaaatcttgacacatatgacatatatacattatggcaagaaaaaacaaatata

SEQ ID NO: 1598 - DNA, 200 bp, Conyza canadensis
tatatttgttttttcttgccataatgtatatatgtcatatgtgtcaagattttgactgtaaattaggtaaacactcaatgcctttattgtcaaaattccccaactttgttggttagggtagcacctacatcatgtgagtttgtatatatgtgaaaagagtaaaaaggctggctactacaccaccaaacttcaacttattg

SEQ ID NO: 1599 - DNA, 200 bp, Conyza canadensis
attatggcaagaaaaaacaaatatatcctaagtttagaccaacaccatgttgttttaaaatgatattaaatatgtaagttatatacatttctacttattggttttagtggtttatttctatatttgctataaaagtataaattatggttttccaatatgttttgtttagagctttagccgttgaattcatggaagaatga

SEQ ID NO: 1600 - DNA, 200 bp, Conyza canadensis
tcattcttccatgaattcaacggctaaagctctaaacaaaacatattggaaaaccataatttatacttttatagcaaatatagaaataaaccactaaaaccaataagtagaaatgtatataacttacatatttaatatcattttaaaacaacatggtgttggtctaaacttaggatatatttgttttttcttgccataat

SEQ ID NO: 1601 - DNA, 200 bp, Conyza canadensis
agccgttgaattcatggaagaatgacattttggggtaagttattgacatgaacgggctaacaccttagaaaaaattattgaagtatttatagatgtgtgtaataactcgaagacatgtatcaatgtcaataaataaggtaacgagaggaaaaataaacttatgcatcaacgaataaatgaattaggtattaagatatgat

SEQ ID NO: 1602 - DNA, 200 bp, Conyza canadensis
atcatatcttaatacctaattcatttattcgttgatgcataagtttatttttcctctcgttaccttatttattgacattgatacatgtcttcgagttattacacacatctataaatacttcaataattttttctaaggtgttagcccgttcatgtcaataacttaccccaaaatgtcattcttccatgaattcaacggct

SEQ ID NO: 1603 - DNA, 200 bp, Conyza canadensis
aatgaattaggtattaagatatgataaaattgacatgatgtttactctcttttctttttttccaaaaaaaaaaaattatcgttcatcttgaattaattagttagtttttttttttttttaattagttactatcacaaagagtgttgaaaaagccctcattcaaatgattattccaattcaggaaaatcttaacacaaagt

SEQ ID NO: 1604 - DNA, 200 bp, Conyza canadensis
actttgtgttaagattttcctgaattggaataatcatttgaatgagggctttttcaacactctttgtgatagtaactaattaaaaaaaaaaaaaaactaactaattaattcaagatgaacgataattttttttttttggaaaaaaagaaaagagagtaaacatcatgtcaattttatcatatcttaatacctaattcatt

SEQ ID NO: 1605 - DNA, 200 bp, Conyza canadensis
attcaggaaaatcttaacacaaagtacacaactaaaaagaggacattaatcaaaacatcatactcaaaacatttgatagtgaacaatagatcaattggctggagtttttttttttttttttttattcctgatcataagtttgactcttcaaaatgacatacttttaggttttcttttgactaacttataacagcttatga

SEQ ID NO: 1606 - DNA, 200 bp, Conyza canadensis
tcataagctgttataagttagtcaaaagaaaacctaaaagtatgtcattttgaagagtcaaacttatgatcaggaataaaaaaaaaaaaaaaaaaactccagccaattgatctattgttcactatcaaatgttttgagtatgatgttttgattaatgtcctctttttagttgtgtactttgtgttaagattttcctgaat

SEQ ID NO: 1607 - DNA, 200 bp, Conyza canadensis
ttgactaacttataacagcttatgatttacatcttgtaatttaaagtatgtgtagggattcaccattgtatgatgagatatcccctgatatcaaataacaactgactcttgaagaaaaacatactaatcgaaaccaaaaaaaaaaaaagaacgcaaagttgtagatggagttgttcataagcttaaattcctcttgatcc

SEQ ID NO: 1608 - DNA, 200 bp, Conyza canadensis
ggatcaagaggaatttaagcttatgaacaactccatctacaactttgcgttctttttttttttttggtttcgattagtatgtttttcttcaagagtcagttgttatttgatatcaggggatatctcatcatacaatggtgaatccctacacatactttaaattacaagatgtaaatcataagctgttataagttagtcaa

SEQ ID NO: 1609 - DNA, 200 bp, Conyza canadensis
cataagcttaaattcctcttgatccagtgggtatctttggtgcaccacgtgaatgctgatttcctcttgaagttattaagcttgtaatgacaacaactatggtttaaaatgattctagaagttaaatactacgaggtagacattttttcatcatttgttagataggcgcattttgaagatcgttcaagtcgtcttcaaaa

SEQ ID NO: 1610 - DNA, 200 bp, Conyza canadensis
ttttgaagacgacttgaacgatcttcaaaatgcgcctatctaacaaatgatgaaaaaatgtctacctcgtagtatttaacttctagaatcattttaaaccatagttgttgtcattacaagcttaataacttcaagaggaaatcagcattcacgtggtgcaccaaagatacccactggatcaagaggaatttaagcttatg

SEQ ID NO: 1611 - DNA, 200 bp, Conyza canadensis
aagatcgttcaagtcgtcttcaaaaacgtcctttttacctaatgatcaatcaaggcacgcacctagctatgagatgaatacgttgttgatattccgcttttcgttatcaccattcatctcgacacgacgtatatatctatatatatcccaactctagattatattcataagttcgtatattgatgaactatatatgtgtt

SEQ ID NO: 1612 - DNA, 200 bp, Conyza canadensis
aacacatatatagttcatcaatatacgaacttatgaatataatctagagttgggatatatatagatatatacgtcgtgtcgagatgaatggtgataacgaaaagcggaatatcaacaacgtattcatctcatagctaggtgcgtgccttgattgatcattaggtaaaaaggacgtttttgaagacgacttgaacgatctt

SEQ ID NO: 1613 - DNA, 200 bp, Conyza canadensis
tatattgatgaactatatatgtgttatgcacatgcaatgcacccataacatggaagaagaattattgctttattcattcatgtggaaaattaggtataatggaatacaatgaaggaacatgacaaaggtgttacccaatcactaaaattgtgtttggcactaatggagcattgcaattgtactttctaaataatccatat

SEQ ID NO: 1614 - DNA, 200 bp, Conyza canadensis
atatggattatttagaaagtacaattgcaatgctccattagtgccaaacacaattttagtgattgggtaacacctttgtcatgttccttcattgtattccattatacctaattttccacatgaatgaataaagcaataattcttcttccatgttatgggtgcattgcatgtgcataacacatatatagttcatcaatata

SEQ ID NO: 1615 - DNA, 200 bp, Conyza canadensis
attgtactttctaaataatccatatctttaatggatggaaagtttcatacttacttattacaatcagtagataaccataaaaatgacattaatattgacctttaattaatagaattttagagtttttaacaaatcttttgtcatggacttcgtatgtaaattggggaaatgcaatttgtcttctatgcaaaatacgaaac

SEQ ID NO: 1616 - DNA, 200 bp, Conyza canadensis
gtttcgtattttgcatagaagacaaattgcatttccccaatttacatacgaagtccatgacaaaagatttgttaaaaactctaaaattctattaattaaaggtcaatattaatgtcatttttatggttatctactgattgtaataagtaagtatgaaactttccatccattaaagatatggattatttagaaagtacaat

SEQ ID NO: 1617 - DNA, 200 bp, Conyza canadensis
ttgtcttctatgcaaaatacgaaaccaattagatccaaaaggtatgatgatagtaacatcaatcaatactcatttataaaagaaggtttcctttcattttcaatttttgtgtgctcttaatataaacctcacactaaaaatgacttatcccatactcacatgacatgtctcttaacttccctttcaattagctttttttt

SEQ ID NO: 1618 - DNA, 200 bp, Conyza canadensis
aaaaaaaagctaattgaaagggaagttaagagacatgtcatgtgagtatgggataagtcatttttagtgtgaggtttatattaagagcacacaaaaattgaaaatgaaaggaaaccttcttttataaatgagtattgattgatgttactatcatcataccttttggatctaattggtttcgtattttgcatagaagacaa

SEQ ID NO: 1619 - DNA, 200 bp, Conyza canadensis
cttccctttcaattagctttttttttcttccactcctttattgcacatctaaaattaatttttaaaaatatgactaatgacttttaatcaattatgggactagttaacttattaaaaaagtatccccttattgaaagttacatagagaaatgtttaaattactctccaaatttaattatataatattttcatctagcacc

SEQ ID NO: 1620 - DNA, 200 bp, Conyza canadensis
ggtgctagatgaaaatattatataattaaatttggagagtaatttaaacatttctctatgtaactttcaataaggggatacttttttaataagttaactagtcccataattgattaaaagtcattagtcatatttttaaaaattaattttagatgtgcaataaaggagtggaagaaaaaaaaagctaattgaaagggaag

SEQ ID NO: 1621 - DNA, 200 bp, Conyza canadensis
ttatataatattttcatctagcaccccttaaaatatattcacataaactatccccttaacattaatgattaagttacactatcaatcgttaatcttttagaatatcttcattaaccctagctataaataaattacttttatatcaattatttacaccacttagcgtcacttccaccaccaacagttgtcccatcatcaca

SEQ ID NO: 1622 - DNA, 200 bp, Conyza canadensis
tgtgatgatgggacaactgttggtggtggaagtgacgctaagtggtgtaaataattgatataaaagtaatttatttatagctagggttaatgaagatattctaaaagattaacgattgatagtgtaacttaatcattaatgttaaggggatagtttatgtgaatatattttaaggggtgctagatgaaaatattatataa

SEQ ID NO: 1623 - DNA, 200 bp, Conyza canadensis
caccaacagttgtcccatcatcacaccgtcaccgccacaaccactgctgcattgcgtggatataatgctactataaataataaatagtaagcttgtaaggaaaaagagtgcctcaaatacttttcttataacccatttgcaaaaataatggatatcttagaatggctaaggaataacttatagcatattttttaaaaaaa

SEQ ID NO: 1624 - DNA, 200 bp, Conyza canadensis
tttttttaaaaaatatgctataagttattccttagccattctaagatatccattatttttgcaaatgggttataagaaaagtatttgaggcactctttttccttacaagcttactatttattatttatagtagcattatatccacgcaatgcagcagtggttgtggcggtgacggtgtgatgatgggacaactgttggtg

SEQ ID NO: 1625 - DNA, 200 bp, Conyza canadensis
acttatagcatattttttaaaaaaaaataacactttatatttggaagtgttgaaaaatatgtaatatttttatttaacacgccttaaaatatttttacatacactattctcttaatattaataattaaattacactatcaatcctttatttttctaaaatatctccattaaccttttaaatcaattatctacaccactcg

SEQ ID NO: 1626 - DNA, 200 bp, Conyza canadensis
cgagtggtgtagataattgatttaaaaggttaatggagatattttagaaaaataaaggattgatagtgtaatttaattattaatattaagagaatagtgtatgtaaaaatattttaaggcgtgttaaataaaaatattacatatttttcaacacttccaaatataaagtgttatttttttttaaaaaatatgctataagt

SEQ ID NO: 1627 - DNA, 200 bp, Conyza canadensis
ttaaatcaattatctacaccactcgacgtcgccttcactaccaactatcgccaccaccacactgtcatcgtcacgattaccgccgcattacgcaggtaccatgctagttgaatttaactataataactatgaagtgaagttgaattaatcaaagttatgaaagacgaaaaaacttcactcactaaaaacaatagaaacct

SEQ ID NO: 1628 - DNA, 200 bp, Conyza canadensis
aggtttctattgtttttagtgagtgaagttttttcgtctttcataactttgattaattcaacttcacttcatagttattatagttaaattcaactagcatggtacctgcgtaatgcggcggtaatcgtgacgatgacagtgtggtggtggcgatagttggtagtgaaggcgacgtcgagtggtgtagataattgatttaa

SEQ ID NO: 1629 - DNA, 200 bp, Conyza canadensis
cactcactaaaaacaatagaaaccttattctttttacaagtgaattttacctcaaacgtgtatgatgtatgcaaatcgcacaacgaatgggtcccgcactaagcggatcttaaatagtttttctcaccataacacctccttaattagaaaatatcgtcgaggagaacctaccaaaactcgaactcaagatcttggaataa

SEQ ID NO: 1630 - DNA, 200 bp, Conyza canadensis
ttattccaagatcttgagttcgagttttggtaggttctcctcgacgatattttctaattaaggaggtgttatggtgagaaaaactatttaagatccgcttagtgcgggacccattcgttgtgcgatttgcatacatcatacacgtttgaggtaaaattcacttgtaaaaagaataaggtttctattgtttttagtgagtg

SEQ ID NO: 1631 - DNA, 200 bp, Conyza canadensis
actcgaactcaagatcttggaataaattctccggaggccccgcatagcaggtttagtgaaacaccactggccataaacgaaatgtaaataatttatttcaaatcgtataaattagaaaaagcaacacgtttggcaaagtttcatttccctggtattatttataagttttcattaatattccaacaactaaaaatggtaat

SEQ ID NO: 1632 - DNA, 200 bp, Conyza canadensis
attaccatttttagttgttggaatattaatgaaaacttataaataataccagggaaatgaaactttgccaaacgtgttgctttttctaatttatacgatttgaaataaattatttacatttcgtttatggccagtggtgtttcactaaacctgctatgcggggcctccggagaatttattccaagatcttgagttcgagt

SEQ ID NO: 1633 - DNA, 200 bp, Conyza canadensis
tattccaacaactaaaaatggtaatgatgaggagttatcaacgaatgtcaaaactaaattcatttgtatactcacaatcaaatattaatcaaaacaaatctttaatattatatatcatcactagaaactagaaagtaaacatataaaattgagtggtagattatgaaatattatataataacgaccagttaaaaaggtta

SEQ ID NO: 1634 - DNA, 200 bp, Conyza canadensis
taacctttttaactggtcgttattatataatatttcataatctaccactcaattttatatgtttactttctagtttctagtgatgatatataatattaaagatttgttttgattaatatttgattgtgagtatacaaatgaatttagttttgacattcgttgataactcctcatcattaccatttttagttgttggaata

SEQ ID NO: 1635 - DNA, 200 bp, Conyza canadensis
taataacgaccagttaaaaaggttataactaaagggttgtgatcaaatgaatctaataaaaatagtggatatcaaggacttaatcacagccataggatcagatgaaataaatggtccagattagattttaaaaaaacacacggaggggtaaaatggtaaatttacctcctatgctcacctaacattatataacagatcca

SEQ ID NO: 1636 - DNA, 200 bp, Conyza canadensis
tggatctgttatataatgttaggtgagcataggaggtaaatttaccattttacccctccgtgtgtttttttaaaatctaatctggaccatttatttcatctgatcctatggctgtgattaagtccttgatatccactatttttattagattcatttgatcacaaccctttagttataacctttttaactggtcgttatta

SEQ ID NO: 1637 - DNA, 200 bp, Conyza canadensis
cacctaacattatataacagatccagaatcccaatcaaaaccctaaaaataaaaacaaatcgtgaaatcaaatggagatttctccggcgatcaaatcgtgaaatcaaacaatcgtgatatcaaatcgtgatatcaaatcgtgaaattccgactaataacaataaaaaactccggcgatctggaatctgtgagcggtggta

SEQ ID NO: 1638 - DNA, 200 bp, Conyza canadensis
taccaccgctcacagattccagatcgccggagttttttattgttattagtcggaatttcacgatttgatatcacgatttgatatcacgattgtttgatttcacgatttgatcgccggagaaatctccatttgatttcacgatttgtttttatttttagggttttgattgggattctggatctgttatataatgttaggtg

SEQ ID NO: 1639 - DNA, 200 bp, Conyza canadensis
gatctggaatctgtgagcggtggtacagctaattgacataatctttgttgataatcttcaataattcagtgatggaatcaatagaagaattagttatggaatcaaaagaacatgatgtttccgacgacgagattattgaagatgaagaagggatatttgcagacgaggaagaagacaacacaggtacataaccaatcaaa

SEQ ID NO: 1640 - DNA, 200 bp, Conyza canadensis
tttgattggttatgtacctgtgttgtcttcttcctcgtctgcaaatatcccttcttcatcttcaataatctcgtcgtcggaaacatcatgttcttttgattccataactaattcttctattgattccatcactgaattattgaagattatcaacaaagattatgtcaattagctgtaccaccgctcacagattccagatc

SEQ ID NO: 1641 - DNA, 200 bp, Conyza canadensis
caacacaggtacataaccaatcaaagttgattttacatataatcgttgatttcacataggaatatagtttttcagcttgaagtaacatgcctaataaaatcaaagttgattgtacataggaatatagcttttctgcttacaatcaaagttgattgtacataggaatatagcttttatgcttacaatcaaggttgattcta

SEQ ID NO: 1642 - DNA, 200 bp, Conyza canadensis
tagaatcaaccttgattgtaagcataaaagctatattcctatgtacaatcaactttgattgtaagcagaaaagctatattcctatgtacaatcaactttgattttattaggcatgttacttcaagctgaaaaactatattcctatgtgaaatcaacgattatatgtaaaatcaactttgattggttatgtacctgtgttg

SEQ ID NO: 1643 - DNA, 200 bp, Conyza canadensis
atgcttacaatcaaggttgattctacatatgcatgtaaattttgtgtttgaactaatctggctaatccaatcaagttgattgtacataggaatatagcttttgtacttacaatcaaagctgattgtacataggaatatagcttttgtgcttacaatcaaggttgattgtacatatgcatctaaattttgtgtttgaacta

SEQ ID NO: 1644 - DNA, 200 bp, Conyza canadensis
tagttcaaacacaaaatttagatgcatatgtacaatcaaccttgattgtaagcacaaaagctatattcctatgtacaatcagctttgattgtaagtacaaaagctatattcctatgtacaatcaacttgattggattagccagattagttcaaacacaaaatttacatgcatatgtagaatcaaccttgattgtaagcat

SEQ ID NO: 1645 - DNA, 200 bp, Conyza canadensis
cctttgggtagaggcaagattgtctacatctcacctcccccataccctgctcactgtgttgtttagtttatttaaaggtggaaaggaaaggagatgagaggagaaatatataagatgcattcttaagatttttttaagtgtggaaagggaaggagtagaaaggattagagggggaagttgatatggatctgcgggaagtt

SEQ ID NO: 1646 - DNA, 200 bp, Conyza canadensis
aacttcccgcagatccatatcaacttccccctctaatcctttctactccttccctttccacacttaaaaaaatcttaagaatgcatcttatatatttctcctctcatctcctttcctttccacctttaaataaactaaacaacacagtgagcagggtatgggggaggtgagatgtagacaatcttgcctctacccaaagg

SEQ ID NO: 1647 - DNA, 200 bp, Conyza canadensis
agttgatatggatctgcgggaagtttatattatttagtaatataatattaattttattattattatgattaggaaagtattgtctttacttagatatcttatgatatcttttatattatttagttagcttgatcatcaagctataggattagtataaaaagaatattagggttgtaattctaaagtatgaaatattaatc

SEQ ID NO: 1648 - DNA, 200 bp, Conyza canadensis
gattaatatttcatactttagaattacaaccctaatattctttttatactaatcctatagcttgatgatcaagctaactaaataatataaaagatatcataagatatctaagtaaagacaatactttcctaatcataataataataaaattaatattatattactaaataatataaacttcccgcagatccatatcaact

SEQ ID NO: 1649 - DNA, 200 bp, Conyza canadensis
aattctaaagtatgaaatattaatcagaagtttattgttcttgtttaatcaatttaggagtttactggttctcgaataccagcctatctttgttattgttcttatcatttgatacaagccattggttcgtatcaattggtatcagagcatcgatcttgcaacctgtgcttttcttcaactatggaatcaaggacgatcat

SEQ ID NO: 1650 - DNA, 200 bp, Conyza canadensis
atgatcgtccttgattccatagttgaagaaaagcacaggttgcaagatcgatgctctgataccaattgatacgaaccaatggcttgtatcaaatgataagaacaataacaaagataggctggtattcgagaaccagtaaactcctaaattgattaaacaagaacaataaacttctgattaatatttcatactttagaatt

SEQ ID NO: 1651 - DNA, 200 bp, Conyza canadensis
caactatggaatcaaggacgatcattgatgttgatgctgatgtacagcaataccgtgaatctactgaggcttgggtggacataatgcatgctcggatcaatcgttttcaagcagccaccgcgcgatctcagttggccactcaacaatttcacttgaggtttacaactaggctggataaacttgaaccagttgtagttggg

SEQ ID NO: 1652 - DNA, 200 bp, Conyza canadensis
cccaactacaactggttcaagtttatccagcctagttgtaaacctcaagtgaaattgttgagtggccaactgagatcgcgcggtggctgcttgaaaacgattgatccgagcatgcattatgtccacccaagcctcagtagattcacggtattgctgtacatcagcatcaacatcaatgatcgtccttgattccatagttg

SEQ ID NO: 1653 - DNA, 200 bp, Conyza canadensis
taaacttgaaccagttgtagttgggacacagcagaagttggatgcattggcggcagtggcaaaccagcctctaccccagcaaccgatgattcaggaagttgtcataccaacagtccctacaacttcaccaaaaacaaatcagtttgggttgaagcaatcgaaggtttcacaagcagggtatccttatcccagacaccttc

SEQ ID NO: 1654 - DNA, 200 bp, Conyza canadensis
gaaggtgtctgggataaggataccctgcttgtgaaaccttcgattgcttcaacccaaactgatttgtttttggtgaagttgtagggactgttggtatgacaacttcctgaatcatcggttgctggggtagaggctggtttgccactgccgccaatgcatccaacttctgctgtgtcccaactacaactggttcaagttta

SEQ ID NO: 1655 - DNA, 200 bp, Conyza canadensis
gggtatccttatcccagacaccttcagatcttgcaaggaataatcatcctgatgtgaaccaagaacgaggagctggactaacattcaaggacataagcaatgcttatgaagatctggcaggcgatgaaaagcgatccatatatgacatgaatggggagaatgggcttaaaggtacatgttttggtttaaggaattgtgca

SEQ ID NO: 1656 - DNA, 200 bp, Conyza canadensis
tgcacaattccttaaaccaaaacatgtacctttaagcccattctccccattcatgtcatatatggatcgcttttcatcgcctgccagatcttcataagcattgcttatgtccttgaatgttagtccagctcctcgttcttggttcacatcaggatgattattccttgcaagatctgaaggtgtctgggataaggataccc

SEQ ID NO: 1657 - DNA, 200 bp, Conyza canadensis
atgttttggtttaaggaattgtgcaaaagctgatgaactttctggtttgatacatatgattgagtttgttaaacaacttcgatatgatcagcaagctatggagtttcaagtcagaatttgggatcctggaattactcgaaggaacaatttaaagcaacaccttgaggacaaggtgtttttggggtgggagtaatgatatg

SEQ ID NO: 1658 - DNA, 200 bp, Conyza canadensis
catatcattactcccaccccaaaaacaccttgtcctcaaggtgttgctttaaattgttccttcgagtaattccaggatcccaaattctgacttgaaactccatagcttgctgatcatatcgaagttgtttaacaaactcaatcatatgtatcaaaccagaaagttcatcagcttttgcacaattccttaaaccaaaacat

SEQ ID NO: 1659 - DNA, 200 bp, Conyza canadensis
tttttggggtgggagtaatgatatggatctgctggaagtttatattatttagtattataatattaattttattattaatatgattaggaaagtattgtctttacttagatatcttatgatgtcttttatattatttagttagcttgatcatctagctataggattagtataaaaagaatattagggttgtaattctaaag

SEQ ID NO: 1660 - DNA, 200 bp, Conyza canadensis
ctttagaattacaaccctaatattctttttatactaatcctatagctagatgatcaagctaactaaataatataaaagacatcataagatatctaagtaaagacaatactttcctaatcatattaataataaaattaatattataatactaaataatataaacttccagcagatccatatcattactcccaccccaaaaa

SEQ ID NO: 1661 - DNA, 200 bp, Conyza canadensis
gaatattagggttgtaattctaaagtatgaaatattaatcagaagtttattgttcttgtttaatcaatttaggagtttactggttctcgaataccagcctatctttgttattgtttgatacaagccattggttcgtatcagaagtttagttgttttttgtctcaaaagttttcccctcatttttgaggtgattaggaagg

SEQ ID NO: 1662 - DNA, 200 bp, Conyza canadensis
ccttcctaatcacctcaaaaatgaggggaaaacttttgagacaaaaaacaactaaacttctgatacgaaccaatggcttgtatcaaacaataacaaagataggctggtattcgagaaccagtaaactcctaaattgattaaacaagaacaataaacttctgattaatatttcatactttagaattacaaccctaatattc

SEQ ID NO: 1663 - DNA, 200 bp, Conyza canadensis
ctcatttttgaggtgattaggaaggaaaacttctcttccctctcatctcctttcctcccttaagttaactagacattaatgaatattgggtcattttgttgttgtggctataaggaatgacttgacttaaaaacttatagaaatgctgtgttatccagtaagtaatcgtttttttactatttgtcttttaagaccattca

SEQ ID NO: 1664 - DNA, 200 bp, Conyza canadensis
tgaatggtcttaaaagacaaatagtaaaaaaacgattacttactggataacacagcatttctataagtttttaagtcaagtcattccttatagccacaacaacaaaatgacccaatattcattaatgtctagttaacttaagggaggaaaggagatgagagggaagagaagttttccttcctaatcacctcaaaaatgag

SEQ ID NO: 1665 - DNA, 200 bp, Conyza canadensis
actatttgtcttttaagaccattcattaagcacataaaacaaacaacaatcctgcttaatcgatgtagactacatacatgtagacggacattttatccataaaacagctaattagtcatacataccagttatatgttttacatcgtgcagtgtaaaacttctgcctttactgctaagattttttgtttacatatatatta

SEQ ID NO: 1666 - DNA, 200 bp, Conyza canadensis
taatatatatgtaaacaaaaaatcttagcagtaaaggcagaagttttacactgcacgatgtaaaacatataactggtatgtatgactaattagctgttttatggataaaatgtccgtctacatgtatgtagtctacatcgattaagcaggattgttgtttgttttatgtgcttaatgaatggtcttaaaagacaaatagt

SEQ ID NO: 1667 - DNA, 200 bp, Conyza canadensis
agattttttgtttacatatatattagatatattaaggtttgtattttgatgctaacatttaacattactttttttttttatcggggagtgggttaaagtggttcttctacctggttttagttttttagatgtatatccaatatttattgtgggtaatttaaagttttgaaatttttgtttttttttgtgaacagtataaa

SEQ ID NO: 1668 - DNA, 200 bp, Conyza canadensis
tttatactgttcacaaaaaaaaacaaaaatttcaaaactttaaattacccacaataaatattggatatacatctaaaaaactaaaaccaggtagaagaaccactttaacccactccccgataaaaaaaaaaagtaatgttaaatgttagcatcaaaatacaaaccttaatatatctaatatatatgtaaacaaaaaatct

SEQ ID NO: 1669 - DNA, 200 bp, Conyza canadensis
tgtttttttttgtgaacagtataaagtttctgacttttttgattttttgtgaggtaaagtcgtgaatgtgtaatttggtatttgattgatattcttgatattggtacatagtgaggtgcaaggtgctgatggtttcttagacgggtcatgtttgttttgtgtaaaatacatctgtttttttctttgataacaagttatag

SEQ ID NO: 1670 - DNA, 200 bp, Conyza canadensis
ctataacttgttatcaaagaaaaaaacagatgtattttacacaaaacaaacatgacccgtctaagaaaccatcagcaccttgcacctcactatgtaccaatatcaagaatatcaatcaaataccaaattacacattcacgactttacctcacaaaaaatcaaaaaagtcagaaactttatactgttcacaaaaaaaaaca

SEQ ID NO: 1671 - DNA, 200 bp, Conyza canadensis
ttttttctttgataacaagttatagaagttgcacccaaaaatgttcttgttaaagcgataaaaatttggatagaaggtgacggttaatgattcgatatattgatttgagtttccttttatctattgcattttcacaagttcaacattccaccctcgattttttgatgaatctatgactgaagaaaagggcgattgttgcc

SEQ ID NO: 1672 - DNA, 200 bp, Conyza canadensis
ggcaacaatcgcccttttcttcagtcatagattcatcaaaaaatcgagggtggaatgttgaacttgtgaaaatgcaatagataaaaggaaactcaaatcaatatatcgaatcattaaccgtcaccttctatccaaatttttatcgctttaacaagaacatttttgggtgcaacttctataacttgttatcaaagaaaaaa

SEQ ID NO: 1673 - DNA, 200 bp, Conyza canadensis
actgaagaaaagggcgattgttgcctttggcaatcagttttggattttattttgtcatggaaagggggtgttagttcctgaaccttagtagaagatgataagctatagtttcaatattgcttttctttcttgcatctgaactggttttgcatttttcaaaggactataaaagatgctatttatcacctatgacctatgtt

SEQ ID NO: 1674 - DNA, 200 bp, Conyza canadensis
aacataggtcataggtgataaatagcatcttttatagtcctttgaaaaatgcaaaaccagttcagatgcaagaaagaaaagcaatattgaaactatagcttatcatcttctactaaggttcaggaactaacaccccctttccatgacaaaataaaatccaaaactgattgccaaaggcaacaatcgcccttttcttcagt

SEQ ID NO: 1675 - DNA, 200 bp, Conyza canadensis
ctatttatcacctatgacctatgttataaatagtaaggtattaaactattaatattggtatagtcttgagaaatccatgaatttcgattgagttcataggacacatctaacttatgtttctttacattacgatttacacatcttgtctttgacgtctgattttaaaatagcgtttctattgacattatgcatttctttga

SEQ ID NO: 1676 - DNA, 200 bp, Conyza canadensis
tcaaagaaatgcataatgtcaatagaaacgctattttaaaatcagacgtcaaagacaagatgtgtaaatcgtaatgtaaagaaacataagttagatgtgtcctatgaactcaatcgaaattcatggatttctcaagactataccaatattaatagtttaataccttactatttataacataggtcataggtgataaatag

SEQ ID NO: 1677 - DNA, 200 bp, Conyza canadensis
ctattgacattatgcatttctttgagttctctatataaatttttgtaagctttccatatgtatatactatgaatctgagtgaacttatgctatcaggggactactgttgtagacaacttgttaaacagtgatgatgttcattacatgcttggagctttaagagctctagggttaaatgttgaagaaaatagtgcaattaa

SEQ ID NO: 1678 - DNA, 200 bp, Conyza canadensis
ttaattgcactattttcttcaacatttaaccctagagctcttaaagctccaagcatgtaatgaacatcatcactgtttaacaagttgtctacaacagtagtcccctgatagcataagttcactcagattcatagtatatacatatggaaagcttacaaaaatttatatagagaactcaaagaaatgcataatgtcaatag

SEQ ID NO: 1679 - DNA, 200 bp, Conyza canadensis
atgttgaagaaaatagtgcaattaaaagagcaatcgtagaaggttgtggtggtgtatttcccgtgggtaaagaagccaaggatgaaatccagctttttcttggaaatgcaggaacagctatgcgtccattgactgctgccgttactgctgccggtggaaactcaaggtattttaacttagtgttatattctcctgcattt

SEQ ID NO: 1680 - DNA, 200 bp, Conyza canadensis
aaatgcaggagaatataacactaagttaaaataccttgagtttccaccggcagcagtaacggcagcagtcaatggacgcatagctgttcctgcatttccaagaaaaagctggatttcatccttggcttctttacccacgggaaatacaccaccacaaccttctacgattgctcttttaattgcactattttcttcaacat

SEQ ID NO: 1681 - DNA, 200 bp, Conyza canadensis
cttagtgttatattctcctgcattttatgtctgcttcatcctcctacacatacatttcatgacatgtgtacccatttctctcacctcatcatttcatttttctatgtgtcacaattatatgagtaggaggattcatactttcataggcataaattgtaggaatcaaatatcgtttctttttaacctaacatctcttgatt

SEQ ID NO: 1682 - DNA, 200 bp, Conyza canadensis
aatcaagagatgttaggttaaaaagaaacgatatttgattcctacaatttatgcctatgaaagtatgaatcctcctactcatataattgtgacacatagaaaaatgaaatgatgaggtgagagaaatgggtacacatgtcatgaaatgtatgtgtaggaggatgaagcagacataaaatgcaggagaatataacactaag

SEQ ID NO: 1683 - DNA, 200 bp, Conyza canadensis
ctttttaacctaacatctcttgattagctattataatccgtagaacgtatattaaagttttttgtgccgatatgtaattttaaggtgaatacacaaataaaaattttacctttctgtttgttgcatgttctgtacatataaatttttagtttttgttatatatctaagaatctaagatctctaaatattcttctattagt

SEQ ID NO: 1684 - DNA, 200 bp, Conyza canadensis
actaatagaagaatatttagagatcttagattcttagatatataacaaaaactaaaaatttatatgtacagaacatgcaacaaacagaaaggtaaaatttttatttgtgtattcaccttaaaattacatatcggcacaaaaaactttaatatacgttctacggattataatagctaatcaagagatgttaggttaaaaag

SEQ ID NO: 1685 - DNA, 200 bp, Conyza canadensis
gatctctaaatattcttctattagttgacacaaattaagggatcacatgaactgaaaactcaatagcatccacttgttgataatgctgcaatttaatgcccaaagaagaaattattgcaattcttattatcattttatttatgggagacagtgagtatgaatttgggaatcgataatagagttgaccaacttggtggtgc

SEQ ID NO: 1686 - DNA, 200 bp, Conyza canadensis
gcaccaccaagttggtcaactctattatcgattcccaaattcatactcactgtctcccataaataaaatgataataagaattgcaataatttcttctttgggcattaaattgcagcattatcaacaagtggatgctattgagttttcagttcatgtgatcccttaatttgtgtcaactaatagaagaatatttagagatc

SEQ ID NO: 1687 - DNA, 200 bp, Conyza canadensis
atagagttgaccaacttggtggtgctgggtagctaaggtagtgggtaagttacattgatatgtaataccctaacagttatgagttttttcttcagctacatactagatggtgttcctcgaatgagggagaggccaattggtgatctggtcaccggtctaaaacagcttggtgcaaatgttgattgttctctcggtacaaa

SEQ ID NO: 1688 - DNA, 200 bp, Conyza canadensis
tttgtaccgagagaacaatcaacatttgcaccaagctgttttagaccggtgaccagatcaccaattggcctctccctcattcgaggaacaccatctagtatgtagctgaagaaaaaactcataactgttagggtattacatatcaatgtaacttacccactaccttagctacccagcaccaccaagttggtcaactctat

SEQ ID NO: 1689 - DNA, 200 bp, Conyza canadensis
atgttgattgttctctcggtacaaactgcccaccggttcgtgtagttggaagtggaggccttcctggtggaaaggtaatcaacaataagattgctgcattttaaagtcgtaagaattaattatttggttccatatatgattggaaaatttggttatttaagaaactattaattagtaatgaaattatagtttttgaatct

SEQ ID NO: 1690 - DNA, 200 bp, Conyza canadensis
agattcaaaaactataatttcattactaattaatagtttcttaaataaccaaattttccaatcatatatggaaccaaataattaattcttacgactttaaaatgcagcaatcttattgttgattacctttccaccaggaaggcctccacttccaactacacgaaccggtgggcagtttgtaccgagagaacaatcaacat

SEQ ID NO: 1691 - DNA, 200 bp, Conyza canadensis
taatgaaattatagtttttgaatctttttgtaatcttctttccctggccttcttattgcaggtgaaattgtcaggatctataagtagccaatacttgacttctttgcttatggcggctcctcttgcactgggagacgtagagatagaaattgtagataaattgatctctgtaccatatgtggagatgacacttaagttga

SEQ ID NO: 1692 - DNA, 200 bp, Conyza canadensis
tcaacttaagtgtcatctccacatatggtacagagatcaatttatctacaatttctatctctacgtctcccagtgcaagaggagccgccataagcaaagaagtcaagtattggctacttatagatcctgacaatttcacctgcaataagaaggccagggaaagaagattacaaaaagattcaaaaactataatttcatta

SEQ ID NO: 1693 - DNA, 200 bp, Conyza canadensis
tatgtggagatgacacttaagttgatggagcggtttggggtttcagtagaacacagtgatacttgggacagattccatgtccgaggcggtcaaaagtacaagtaagttgatcatttcataaaagtcaatttttacgtgaagatcggtcaacatctattttaatccgataaaatctctttaggtcacctggaaatgcttat

SEQ ID NO: 1694 - DNA, 200 bp, Conyza canadensis
ataagcatttccaggtgacctaaagagattttatcggattaaaatagatgttgaccgatcttcacgtaaaaattgacttttatgaaatgatcaacttacttgtacttttgaccgcctcggacatggaatctgtcccaagtatcactgtgttctactgaaaccccaaaccgctccatcaacttaagtgtcatctccacata

SEQ ID NO: 1695 - DNA, 200 bp, Conyza canadensis
ctttaggtcacctggaaatgcttatgtggaaggtgatgcttcaagtgcgagttacttcttagctggtgctgccatcactggcggaactgtcaccgtggaaggttgcgggacaagcagtttacaggtattatccatgtgcccacctcaaagatattcaaaaactaaattgtttctcaagtatatattcttctagttaattg

SEQ ID NO: 1696 - DNA, 200 bp, Conyza canadensis
caattaactagaagaatatatacttgagaaacaatttagtttttgaatatctttgaggtgggcacatggataatacctgtaaactgcttgtcccgcaaccttccacggtgacagttccgccagtgatggcagcaccagctaagaagtaactcgcacttgaagcatcaccttccacataagcatttccaggtgacctaaag

SEQ ID NO: 1697 - DNA, 200 bp, Conyza canadensis
aagtatatattcttctagttaattgcaaatttttttgccccatacgtctacccattctataaatttcgtccaaagttggtgactcggttcaatcgtgtaataagtctcttttttgttttttagaattgacaatttatgtcagttcttggttatatcaacgatgtgggagtgtattgtgcacacattctaaaagaaggaca

SEQ ID NO: 1698 - DNA, 200 bp, Conyza canadensis
tgtccttcttttagaatgtgtgcacaatacactcccacatcgttgatataaccaagaactgacataaattgtcaattctaaaaaacaaaaaagagacttattacacgattgaaccgagtcaccaactttggacgaaatttatagaatgggtagacgtatggggcaaaaaaatttgcaattaactagaagaatatatactt

SEQ ID NO: 1699 - DNA, 200 bp, Conyza canadensis
gtgcacacattctaaaagaaggacatttagtctttttgctttctttttgcctcaagatcatcttcatcttttcaagatactctgcactcatttgcattatcaaagttttggatgcattctgtaactgtggtacaaggagggagacataatatgtcattagttcttattcttaagctcaatgcacactatcacctcttact

SEQ ID NO: 1700 - DNA, 200 bp, Conyza canadensis
agtaagaggtgatagtgtgcattgagcttaagaataagaactaatgacatattatgtctccctccttgtaccacagttacagaatgcatccaaaactttgataatgcaaatgagtgcagagtatcttgaaaagatgaagatgatcttgaggcaaaaagaaagcaaaaagactaaatgtccttcttttagaatgtgtgcac

SEQ ID NO: 1701 - DNA, 200 bp, Conyza canadensis
tcaatgcacactatcacctcttacttcttttttctttctttttttttattagtttatttaagctcaatgcacactaacacttcttctttataacttcaagtcattcattttaatttttgaagctgatggtttttgacattaaagatagaactatgtatatacatatgtcatttcatcttacctatttgcatgtcttgttg

SEQ ID NO: 1702 - DNA, 200 bp, Conyza canadensis
caacaagacatgcaaataggtaagatgaaatgacatatgtatatacatagttctatctttaatgtcaaaaaccatcagcttcaaaaattaaaatgaatgacttgaagttataaagaagaagtgttagtgtgcattgagcttaaataaactaataaaaaaaaagaaagaaaaaagaagtaagaggtgatagtgtgcattga

SEQ ID NO: 1703 - DNA, 200 bp, Conyza canadensis
tcttacctatttgcatgtcttgttgatctttaatcagggtgatgtaaaatttgctgaggtccttggacaaatgggtgctgaagtaacctggacagagaactctgtcacggtgaagggtccgccaaggaattcttccggaaggggacacttgcgtccagtagatgtgaacatgaacaaaatgccggatgttgcgatgactc

SEQ ID NO: 1704 - DNA, 200 bp, Conyza canadensis
gagtcatcgcaacatccggcattttgttcatgttcacatctactggacgcaagtgtccccttccggaagaattccttggcggacccttcaccgtgacagagttctctgtccaggttacttcagcacccatttgtccaaggacctcagcaaattttacatcaccctgattaaagatcaacaagacatgcaaataggtaaga

SEQ ID NO: 1705 - DNA, 200 bp, Conyza canadensis
aaaatgccggatgttgcgatgactcttgctgtggttgccctttatgctgatggccccactgccattagagacggtatgtgttagaattcaccacagctttgtaatgttaaatatatgttagtttagattaacaaaatgactatatgatcacaaaaggaaacatttatctcaaatttggaactaatatagtatcataccta

SEQ ID NO: 1706 - DNA, 200 bp, Conyza canadensis
taggtatgatactatattagttccaaatttgagataaatgtttccttttgtgatcatatagtcattttgttaatctaaactaacatatatttaacattacaaagctgtggtgaattctaacacataccgtctctaatggcagtggggccatcagcataaagggcaaccacagcaagagtcatcgcaacatccggcatttt

SEQ ID NO: 1707 - DNA, 200 bp, Conyza canadensis
tggaactaatatagtatcatacctatatagcaattgtagtttcaaagaaatccttaaggtcgtgttgtttattatacatgactgggtatatattgttttttgtgctcaagcttttaaaaatcacatttgactatcctttattgaaaggttaattttgttcatgtctcattttaggcaatttactttttatcaaggaaaaa

SEQ ID NO: 1708 - DNA, 200 bp, Conyza canadensis
tttttccttgataaaaagtaaattgcctaaaatgagacatgaacaaaattaacctttcaataaaggatagtcaaatgtgatttttaaaagcttgagcacaaaaaacaatatatacccagtcatgtataataaacaacacgaccttaaggatttctttgaaactacaattgctatataggtatgatactatattagttcca

SEQ ID NO: 1709 - DNA, 200 bp, Conyza canadensis
caatttactttttatcaaggaaaaaatagcaatcaatgtctatgtcgtagtttaggcaattaaaacccatcaatcaaagtgctgttggttcaaggcatattagagataaatgagataatagtacgtggatgtcttttcaaaagaagtacaaactttttcttgggctctttagtttttactgaaaataccaaactccttta

SEQ ID NO: 1710 - DNA, 200 bp, Conyza canadensis
taaaggagtttggtattttcagtaaaaactaaagagcccaagaaaaagtttgtacttcttttgaaaagacatccacgtactattatctcatttatctctaatatgccttgaaccaacagcactttgattgatgggttttaattgcctaaactacgacatagacattgattgctattttttccttgataaaaagtaaattg

SEQ ID NO: 1711 - DNA, 200 bp, Conyza canadensis
ttactgaaaataccaaactcctttaactgaattgtctaaaatagaagaaactggaaattagttgctattttgtgaaaacgaaaagtaaatcgccaaaaattggaggttaagtatgcttatattttatgtaattcatctttttgaaaaatgtaagaacttaaatggaagtgaattgatttgaaaaatatatattaaagcac

SEQ ID NO: 1712 - DNA, 200 bp, Conyza canadensis
gtgctttaatatatatttttcaaatcaattcacttccatttaagttcttacatttttcaaaaagatgaattacataaaatataagcatacttaacctccaatttttggcgatttacttttcgttttcacaaaatagcaactaatttccagtttcttctattttagacaattcagttaaaggagtttggtattttcagtaa

SEQ ID NO: 1713 - DNA, 200 bp, Conyza canadensis
atttgaaaaatatatattaaagcaccacttatgaagaaatctagaaattgagttttaggatctgtaaagacatcctgtatattgtatgagaatagatatatcgtacaccacaatccatcatttttacttttcacacgacaaagtgaatatgaaaaatgtgagttaaaacacttaaaagacagttttgggtgtgcaaagta

SEQ ID NO: 1714 - DNA, 200 bp, Conyza canadensis
tactttgcacacccaaaactgtcttttaagtgttttaactcacatttttcatattcactttgtcgtgtgaaaagtaaaaatgatggattgtggtgtacgatatatctattctcatacaatatacaggatgtctttacagatcctaaaactcaatttctagatttcttcataagtggtgctttaatatatatttttcaaat

SEQ ID NO: 1715 - DNA, 200 bp, Conyza canadensis
aagacagttttgggtgtgcaaagtaaaatgtagcacaaattggcccctttctcatattgggtttacatattcttctttacgtatatccctatattgttcattttgtgggccccatctcacgtcggtaaatcattagatggactaaatcatattcttcattccttatattgggcagtggctagctggagagtaaaagaaac

SEQ ID NO: 1716 - DNA, 200 bp, Conyza canadensis
gtttcttttactctccagctagccactgcccaatataaggaatgaagaatatgatttagtccatctaatgatttaccgacgtgagatggggcccacaaaatgaacaatatagggatatacgtaaagaagaatatgtaaacccaatatgagaaaggggccaatttgtgctacattttactttgcacacccaaaactgtctt

SEQ ID NO: 1717 - DNA, 200 bp, Conyza canadensis
tggctagctggagagtaaaagaaacggaaaggatgattgccatctgcacagaactaagaaaggtacaagtcattaacccatcttactctaaaaaatagaatggccatgagtacttttaaagtactcaatgaatctgcccattatttgtttagtgctaataggcccttttgcccttggaacttttcagttgggagcaacag

SEQ ID NO: 1718 - DNA, 200 bp, Conyza canadensis
ctgttgctcccaactgaaaagttccaagggcaaaagggcctattagcactaaacaaataatgggcagattcattgagtactttaaaagtactcatggccattctattttttagagtaagatgggttaatgacttgtacctttcttagttctgtgcagatggcaatcatcctttccgtttcttttactctccagctagcca

SEQ ID NO: 1719 - DNA, 200 bp, Conyza canadensis
ggaacttttcagttgggagcaacagtcgaagaaggtccagattattgtgtgatcactccaccagagaaattgaatgtgacagcaatcgacacatacgatgatcacagaatggccatggctttctcgcttgccgcctgtgcagaggttcctgtcaccattaaggacccgggttgcacccgtaagaccttccccgactactt

SEQ ID NO: 1720 - DNA, 200 bp, Conyza canadensis
aagtagtcggggaaggtcttacgggtgcaacccgggtccttaatggtgacaggaacctctgcacaggcggcaagcgagaaagccatggccattctgtgatcatcgtatgtgtcgattgctgtcacattcaatttctctggtggagtgatcacacaataatctggaccttcttcgactgttgctcccaactgaaaagttcc

SEQ ID NO: 1721 - DNA, 200 bp, Conyza canadensis
cccgtaagaccttccccgactactttgaagttcttgaaagatacactaagcattaaatcacatataagatgttcagaaagaaaggggttagaggttttaaaatgacacctttacccttcagtccttcaccattatctttcttcagaaatgtttcacttacagagttacatcatatgtatatgggcgacctgagcgtattt

SEQ ID NO: 1722 - DNA, 200 bp, Conyza canadensis
aaatacgctcaggtcgcccatatacatatgatgtaactctgtaagtgaaacatttctgaagaaagataatggtgaaggactgaagggtaaaggtgtcattttaaaacctctaacccctttctttctgaacatcttatatgtgatttaatgcttagtgtatctttcaagaacttcaaagtagtcggggaaggtcttacggg

SEQ ID NO: 1723 - DNA, 200 bp, Conyza canadensis
gtatatgggcgacctgagcgtattttatcttttcttttcggtgagtttgtagtttttgttgaggtggaataagtattatcttgaatatttatgctaaatttggttagcaatgtattatttttgatgcataatgtatttgttatattataatgaaaagtgtttttgaatatggccaagatttgtgaaggtgagatgagttt

SEQ ID NO: 1724 - DNA, 200 bp, Conyza canadensis
aaactcatctcaccttcacaaatcttggccatattcaaaaacacttttcattataatataacaaatacattatgcatcaaaaataatacattgctaaccaaatttagcataaatattcaagataatacttattccacctcaacaaaaactacaaactcaccgaaaagaaaagataaaatacgctcaggtcgcccatatac

SEQ ID NO: 1725 - DNA, 200 bp, Conyza canadensis
agatttgtgaaggtgagatgagttttgaaccttatactcagatttagcacatggtgacactaaataattgatcctttattagtgctgaaaataattatatgttaagaaagattggttactaacaaaagtggttatgagtgaaagtggggtttaagtttgaagtcataattctcttgagatgttgatttgaagttgagatg

SEQ ID NO: 1726 - DNA, 200 bp, Conyza canadensis
catctcaacttcaaatcaacatctcaagagaattatgacttcaaacttaaaccccactttcactcataaccacttttgttagtaaccaatctttcttaacatataattattttcagcactaataaaggatcaattatttagtgtcaccatgtgctaaatctgagtataaggttcaaaactcatctcaccttcacaaatct

SEQ ID NO: 1727 - DNA, 200 bp, Conyza canadensis
gagatgttgatttgaagttgagatgtacgataggggtgtaaaggcacctttgggatataaacaaaatcatggattatcttattccttatacttctattgtatgttaatttttaattcaattttactgaattacttaaatgatattttgaatactataaaaggttggtattactccatatgttatatgagtcagaaataca

SEQ ID NO: 1728 - DNA, 200 bp, Conyza canadensis
tgtatttctgactcatataacatatggagtaataccaaccttttatagtattcaaaatatcatttaagtaattcagtaaaattgaattaaaaattaacatacaatagaagtataaggaataagataatccatgattttgtttatatcccaaaggtgcctttacacccctatcgtacatctcaacttcaaatcaacatctc

SEQ ID NO: 1729 - DNA, 200 bp, Conyza canadensis
atatgttatatgagtcagaaatacatttcgtaatttgctctacattatcttaagtaatatttctcttctaaatccaaattactagttaataatatatactagtaaaaatgtagctataagcctataactaaaacctgaaaaatgaaaaagaaaataaacgctatataaattatggattcatgcatgtatctattatataa

SEQ ID NO: 1730 - DNA, 200 bp, Conyza canadensis
ttatataatagatacatgcatgaatccataatttatatagcgtttattttctttttcatttttcaggttttagttataggcttatagctacatttttactagtatatattattaactagtaatttggatttagaagagaaatattacttaagataatgtagagcaaattacgaaatgtatttctgactcatataacatat

SEQ ID NO: 1731 - DNA, 200 bp, Conyza canadensis
attcatgcatgtatctattatataaataaaagaaaattgtgatgacatcatatttattagaaaaaaatctacttggcatcattagacattcacatattaattatttattttttttatttaattgatttatgacatcaatataaataaatagaatttgataattctatattaggaaatatcattacttttaaagattttgt

SEQ ID NO: 1732 - DNA, 200 bp, Conyza canadensis
acaaaatctttaaaagtaatgatatttcctaatatagaattatcaaattctatttatttatattgatgtcataaatcaattaaataaaaaaaataaataattaatatgtgaatgtctaatgatgccaagtagatttttttctaataaatatgatgtcatcacaattttcttttatttatataatagatacatgcatgaat

SEQ ID NO: 1733 - DNA, 200 bp, Conyza canadensis
atatcattacttttaaagattttgtggcactattactctattagacatttatataataatactttctttttttatttaattgatttatttataaataactaaactttaatttttaattcccatattagaaaatatctttagttttaaagatttttgtgtggtaacggttataacttaaatgttcatagagtattataaat

SEQ ID NO: 1734 - DNA, 200 bp, Conyza canadensis
atttataatactctatgaacatttaagttataaccgttaccacacaaaaatctttaaaactaaagatattttctaatatgggaattaaaaattaaagtttagttatttataaataaatcaattaaataaaaaaagaaagtattattatataaatgtctaatagagtaatagtgccacaaaatctttaaaagtaatgatat

SEQ ID NO: 1735 - DNA, 200 bp, Conyza canadensis
taaatgttcatagagtattataaatgaatatgaaaggtcttacacattttaattcttatatagattgtatatgtgtttataaaaaaaatcacattttgtacaatatcttgaagtttttcttgaattttattaaattttgtgttatatatcaatgggttgaatgttaaataaattttcattatataattttaggtaaattt

SEQ ID NO: 1736 - DNA, 200 bp, Conyza canadensis
aaatttacctaaaattatataatgaaaatttatttaacattcaacccattgatatataacacaaaatttaataaaattcaagaaaaacttcaagatattgtacaaaatgtgattttttttataaacacatatacaatctatataagaattaaaatgtgtaagacctttcatattcatttataatactctatgaacattta

SEQ ID NO: 1737 - DNA, 200 bp, Conyza canadensis
tcattatataattttaggtaaattttacattatataattgtcctcaataattatttctttagtttgcccgcgtaatacgcgggttacttagctagtcaagtgataaagttccatttaggtaaaaactaaaaaacatgatagaagagtttacgttaattgtattatttatctaaaaattctatttttagtttcgtaagttt

SEQ ID NO: 1738 - DNA, 200 bp, Conyza canadensis
aaacttacgaaactaaaaatagaatttttagataaataatacaattaacgtaaactcttctatcatgttttttagtttttacctaaatggaactttatcacttgactagctaagtaacccgcgtattacgcgggcaaactaaagaaataattattgaggacaattatataatgtaaaatttacctaaaattatataatga

SEQ ID NO: 1739 - DNA, 200 bp, Conyza canadensis
attctatttttagtttcgtaagtttagactgatcgatcatcttgcaactcgatgttatacatggcattttatcttaaaaacttttacccttgtatttttttttttttttttattgtttttctttaaacattcatatctataatcatgaaaagaaataaaataagaattagcgataagccagataaatacaaaaggagaaa

SEQ ID NO: 1740 - DNA, 200 bp, Conyza canadensis
tttctccttttgtatttatctggcttatcgctaattcttattttatttcttttcatgattatagatatgaatgtttaaagaaaaacaataaaaaaaaaaaaaaaaatacaagggtaaaagtttttaagataaaatgccatgtataacatcgagttgcaagatgatcgatcagtctaaacttacgaaactaaaaatagaat

SEQ ID NO: 1741 - DNA, 200 bp, Conyza canadensis
agccagataaatacaaaaggagaaatttaagtacaaatgaaattttatttcatcttatggtacaatgtaataaaaagttataggaaaatttaacttcagtcctaagattgttgttagcgtgaataaataattatactttttattttaaaattagtttgagcgcgttaagtcgttattggcaacccatagagttgttatta

SEQ ID NO: 1742 - DNA, 200 bp, Conyza canadensis
taataacaactctatgggttgccaataacgacttaacgcgctcaaactaattttaaaataaaaagtataattatttattcacgctaacaacaatcttaggactgaagttaaattttcctataactttttattacattgtaccataagatgaaataaaatttcatttgtacttaaatttctccttttgtatttatctggct

SEQ ID NO: 1743 - DNA, 200 bp, Conyza canadensis
ttggcaacccatagagttgttattagcaatactaaattttttaattgtggatagccaaaattaaatggatgggaatttccaatgacacaccggtctagtgttaagacacatgagattttcttataagtcggaagttcgagtcttgtcaagtacaagctttattcatattaatccccaagtagtctatggtgatttctttt

SEQ ID NO: 1744 - DNA, 200 bp, Conyza canadensis
aaaagaaatcaccatagactacttggggattaatatgaataaagcttgtacttgacaagactcgaacttccgacttataagaaaatctcatgtgtcttaacactagaccggtgtgtcattggaaattcccatccatttaattttggctatccacaattaaaaaatttagtattgctaataacaactctatgggttgccaa

SEQ ID NO: 1745 - DNA, 200 bp, Conyza canadensis
caagtagtctatggtgatttcttttggcattgttgctcggcacggggtagtaggatccggtttagacaaccgaccaaccgctttttgggttaggacctcatcatttgatggtgaaggatatgtttctattcgaaagtcatttgttaaaaaataataaaaatgaataaatgaacggaaattatatgcaccataaccttaga

SEQ ID NO: 1746 - DNA, 200 bp, Conyza canadensis
tctaaggttatggtgcatataatttccgttcatttattcatttttattattttttaacaaatgactttcgaatagaaacatatccttcaccatcaaatgatgaggtcctaacccaaaaagcggttggtcggttgtctaaaccggatcctactaccccgtgccgagcaacaatgccaaaagaaatcaccatagactacttg

SEQ ID NO: 1747 - DNA, 200 bp, Conyza canadensis
aaattatatgcaccataaccttagaatatactaccaatattccaggtttatacttgtgacttgccaacatttattgttgttgattgtaataatgctcatgtttccttcattcttcttgtatagttccttgaaaaaatttcttgttgttgattgtaactacaatgattaatgtagaagaaacaatggttaaaaaaaaaatg

SEQ ID NO: 1748 - DNA, 200 bp, Conyza canadensis
cattttttttttaaccattgtttcttctacattaatcattgtagttacaatcaacaacaagaaattttttcaaggaactatacaagaagaatgaaggaaacatgagcattattacaatcaacaacaataaatgttggcaagtcacaagtataaacctggaatattggtagtatattctaaggttatggtgcatataattt

SEQ ID NO: 1749 - DNA, 200 bp, Conyza canadensis
agaaacaatggttaaaaaaaaaatgatatttgtaccatttcttttgattgatgtatcataaatgtgcattgttaacttgtacagttagttatacaatttgtacattattatacattaataaaaaatagtgatactaatatcacaaattaagcgttaaaacagtgtggggtggggtctaaaagactaactcagtaatttat

SEQ ID NO: 1750 - DNA, 200 bp, Conyza canadensis
ataaattactgagttagtcttttagaccccaccccacactgttttaacgcttaatttgtgatattagtatcactattttttattaatgtataataatgtacaaattgtataactaactgtacaagttaacaatgcacatttatgatacatcaatcaaaagaaatggtacaaatatcattttttttttaaccattgtttct

SEQ ID NO: 1751 - DNA, 200 bp, Conyza canadensis
ctaaaagactaactcagtaatttatgatacttggaaattactcttttcccaattaagcttgcaataagttgaagtttggtggtgtagtagccagcctttttactcttttcacatatatacaaactcacatgatgtaggtgctaccctaaccaacaaagttggggaattttgacaataaaggcattgagtgtttacctaat

SEQ ID NO: 1752 - DNA, 200 bp, Conyza canadensis
attaggtaaacactcaatgcctttattgtcaaaattccccaactttgttggttagggtagcacctacatcatgtgagtttgtatatatgtgaaaagagtaaaaaggctggctactacaccaccaaacttcaacttattgcaagcttaattgggaaaagagtaatttccaagtatcataaattactgagttagtcttttag

SEQ ID NO: 1753 - DNA, 200 bp, Conyza canadensis
taaaggcattgagtgtttacctaatttacagtcaaaatcttgacacatatgacatatatacattatggcaagaaaaaacaaatatatcctaagtttagaccaacaccatgttgttttaaaatgatattaaatatgtaagttatatacatttctacttattggttttagtggtttatttctatatttgctataaaagtata

SEQ ID NO: 1754 - DNA, 200 bp, Conyza canadensis
tatacttttatagcaaatatagaaataaaccactaaaaccaataagtagaaatgtatataacttacatatttaatatcattttaaaacaacatggtgttggtctaaacttaggatatatttgttttttcttgccataatgtatatatgtcatatgtgtcaagattttgactgtaaattaggtaaacactcaatgccttta

SEQ ID NO: 1755 - DNA, 200 bp, Conyza canadensis
tttctatatttgctataaaagtataaattatggttttccaatatgttttgtttagagctttagccgttgaattcatggaagaatgacattttggggtaagttattgacatgaacgggctaacaccttagaaaaaattattgaagtatttatagatgtgtgtaataactcgaagacatgtatcaatgtcaataaataaggt

SEQ ID NO: 1756 - DNA, 200 bp, Conyza canadensis
accttatttattgacattgatacatgtcttcgagttattacacacatctataaatacttcaataattttttctaaggtgttagcccgttcatgtcaataacttaccccaaaatgtcattcttccatgaattcaacggctaaagctctaaacaaaacatattggaaaaccataatttatacttttatagcaaatatagaaa

SEQ ID NO: 1757 - DNA, 200 bp, Conyza canadensis
atgtatcaatgtcaataaataaggtaacgagaggaaaaataaacttatgcatcaacgaataaatgaattaggtattaagatatgataaaattgacatgatgtttactctcttttctttttttccaaaaaaaaaaaattatcgttcatcttgaattaattagttagtttttttttttttttttttgaaaagtaattaatta

SEQ ID NO: 1758 - DNA, 200 bp, Conyza canadensis
taattaattacttttcaaaaaaaaaaaaaaaaaaactaactaattaattcaagatgaacgataattttttttttttggaaaaaaagaaaagagagtaaacatcatgtcaattttatcatatcttaatacctaattcatttattcgttgatgcataagtttatttttcctctcgttaccttatttattgacattgatacat

SEQ ID NO: 1759 - DNA, 200 bp, Conyza canadensis
tttttttttgaaaagtaattaattagttactatcacaaagagtgttgaaaaagccctcattcaaatgattattccaattcaggaaaatcttaacacaaagtacacaactaaaaagaggacattaatcaaaacatcatactcaaaacatttgatagtgaacaatagatcaattggctggagtttttttttttttttttttt

SEQ ID NO: 1760 - DNA, 200 bp, Conyza canadensis
aaaaaaaaaaaaaaaaaaaactccagccaattgatctattgttcactatcaaatgttttgagtatgatgttttgattaatgtcctctttttagttgtgtactttgtgttaagattttcctgaattggaataatcatttgaatgagggctttttcaacactctttgtgatagtaactaattaattacttttcaaaaaaaaa

SEQ ID NO: 1761 - DNA, 200 bp, Conyza canadensis
tggagtttttttttttttttttttttttcctgatcataagtttgactcttcaaaatgacatacttttaggttttcttttgactaacttataacagcttatgatttacatcttgtaatttaaagtatgtgtagggattcaccattgtatgatgagatatcccctgatatcaaataacaactgactcttgaagaaaaacata

SEQ ID NO: 1762 - DNA, 200 bp, Conyza canadensis
tatgtttttcttcaagagtcagttgttatttgatatcaggggatatctcatcatacaatggtgaatccctacacatactttaaattacaagatgtaaatcataagctgttataagttagtcaaaagaaaacctaaaagtatgtcattttgaagagtcaaacttatgatcaggaaaaaaaaaaaaaaaaaaaaaaactcca

SEQ ID NO: 1763 - DNA, 200 bp, Conyza canadensis
caactgactcttgaagaaaaacatactaatcgaaaccaaaaaaaaaaaaagaacgccaaagttgtagatggagttgttcataagcttaaattcctcttgatccagtgggtatctttggtgcaccacgtgaatgctgatttcctcttgaagttattaagcttgtaatgacaacaactatggtttaaaatgattctagaagt

SEQ ID NO: 1764 - DNA, 200 bp, Conyza canadensis
acttctagaatcattttaaaccatagttgttgtcattacaagcttaataacttcaagaggaaatcagcattcacgtggtgcaccaaagatacccactggatcaagaggaatttaagcttatgaacaactccatctacaactttggcgttctttttttttttttggtttcgattagtatgtttttcttcaagagtcagttg

SEQ ID NO: 1765 - DNA, 200 bp, Conyza canadensis
tatggtttaaaatgattctagaagttaaatactacgaggtagacattttttcatcatttgttagataggcgcattttgaagatcgttcaagtcgtcttcaaaaacgtcctttttacctaatgatcaatcaaggcacgcacctagctatgagatgaatacgttgttgatattccgcttttcgttatcaccattcatctcga

SEQ ID NO: 1766 - DNA, 200 bp, Conyza canadensis
tcgagatgaatggtgataacgaaaagcggaatatcaacaacgtattcatctcatagctaggtgcgtgccttgattgatcattaggtaaaaaggacgtttttgaagacgacttgaacgatcttcaaaatgcgcctatctaacaaatgatgaaaaaatgtctacctcgtagtatttaacttctagaatcattttaaaccata

SEQ ID NO: 1767 - DNA, 200 bp, Conyza canadensis
ttttcgttatcaccattcatctcgacacgacgtatatatctatatatatcccaactctagattatattcataagttcgtatattgatgaactatatatgtgttatgcacatgcaatgcacccataacatggaagaagaattattgctttattcattcatgtggaaaattaggtataatggaatacaatgaaggaacatga

SEQ ID NO: 1768 - DNA, 200 bp, Conyza canadensis
tcatgttccttcattgtattccattatacctaattttccacatgaatgaataaagcaataattcttcttccatgttatgggtgcattgcatgtgcataacacatatatagttcatcaatatacgaacttatgaatataatctagagttgggatatatatagatatatacgtcgtgtcgagatgaatggtgataacgaaaa

SEQ ID NO: 1769 - DNA, 200 bp, Conyza canadensis
aatggaatacaatgaaggaacatgacaaaggtgttacccaatcactaaaattgtgtttggcactaatggagcattgcaattgtactttctaaataatccatatctttaatggatggaaagtttcatacttacttattacaatcagtagataaccataaaaatgacattaatattgacctttaattaatagaattttagag

SEQ ID NO: 1770 - DNA, 200 bp, Conyza canadensis
ctctaaaattctattaattaaaggtcaatattaatgtcatttttatggttatctactgattgtaataagtaagtatgaaactttccatccattaaagatatggattatttagaaagtacaattgcaatgctccattagtgccaaacacaattttagtgattgggtaacacctttgtcatgttccttcattgtattccatt

SEQ ID NO: 1771 - DNA, 200 bp, Conyza canadensis
acctttaattaatagaattttagagtttttaacaaatcttttgtcatggacttcgtatgtaaattggggaaatgcaatttgtcttctatgcaaaatacgaaaccaattagatccaaaaggtatgatgatagtaacatcaatcaatactcatttataaaagaaggtttcctttcattttcaatttttgtgtgctcttaata

SEQ ID NO: 1772 - DNA, 200 bp, Conyza canadensis
tattaagagcacacaaaaattgaaaatgaaaggaaaccttcttttataaatgagtattgattgatgttactatcatcataccttttggatctaattggtttcgtattttgcatagaagacaaattgcatttccccaatttacatacgaagtccatgacaaaagatttgttaaaaactctaaaattctattaattaaaggt

SEQ ID NO: 1773 - DNA, 200 bp, Conyza canadensis
tttcaatttttgtgtgctcttaatataaacctcacactaaaaatgacttatcccatactcacatgacatgtctcttaacttccctttcaattagctttttttttcttccactcctttattgcacatctaaaattaatttttaaaaatatgactaatgacttttaatcaattatgggactagttaacttattaaaaaagta

SEQ ID NO: 1774 - DNA, 200 bp, Conyza canadensis
tacttttttaataagttaactagtcccataattgattaaaagtcattagtcatatttttaaaaattaattttagatgtgcaataaaggagtggaagaaaaaaaaagctaattgaaagggaagttaagagacatgtcatgtgagtatgggataagtcatttttagtgtgaggtttatattaagagcacacaaaaattgaaa

SEQ ID NO: 1775 - DNA, 200 bp, Conyza canadensis
gactagttaacttattaaaaaagtatccccttattgaaagttacatagagaaatgtttaaattactctccaaatttaattatataatattttcatctagcaccccttaaaatatattcacataaactatccccttaacattaatgattaagttacactatcaatcgttaatcttttagaatatcttcattaaccctagct

SEQ ID NO: 1776 - DNA, 200 bp, Conyza canadensis
agctagggttaatgaagatattctaaaagattaacgattgatagtgtaacttaatcattaatgttaaggggatagtttatgtgaatatattttaaggggtgctagatgaaaatattatataattaaatttggagagtaatttaaacatttctctatgtaactttcaataaggggatacttttttaataagttaactagtc

SEQ ID NO: 1777 - DNA, 200 bp, Conyza canadensis
tagaatatcttcattaaccctagctataaataaattacttttatatcaattatttacaccacttagcgtcacttccaccaccaacagttgtcccatcatcacaccgtcaccgccacaaccactgctgcattgcgtggatataatgctactataaataataaatagtaagcttgtaaggaaaaagagtgcctcaaatactt

SEQ ID NO: 1778 - DNA, 200 bp, Conyza canadensis
aagtatttgaggcactctttttccttacaagcttactatttattatttatagtagcattatatccacgcaatgcagcagtggttgtggcggtgacggtgtgatgatgggacaactgttggtggtggaagtgacgctaagtggtgtaaataattgatataaaagtaatttatttatagctagggttaatgaagatattcta

SEQ ID NO: 1779 - DNA, 200 bp, Conyza canadensis
aggaaaaagagtgcctcaaatacttttcttataacccatttgcaaaaataatggatatcttagaatggctaaggaataacttatagcatattttttaaaaaaaaataacactttatatttggaagtgttgaaaaatatgtaatatttttatttaacacgccttaaaatatttttacatacactatccgttaacattagtg

SEQ ID NO: 1780 - DNA, 200 bp, Conyza canadensis
cactaatgttaacggatagtgtatgtaaaaatattttaaggcgtgttaaataaaaatattacatatttttcaacacttccaaatataaagtgttatttttttttaaaaaatatgctataagttattccttagccattctaagatatccattatttttgcaaatgggttataagaaaagtatttgaggcactctttttcct

SEQ ID NO: 1781 - DNA, 200 bp, Conyza canadensis
catacactatccgttaacattagtgattaaattacactatcaatcctttattttttaaaatatctccattaactctttacatcaattatctacaccactcgacgtcgccttcactaccaactatcgccaccaccacactgtcatcgtcacgattaccgccgcattacgcaggtaccatgctagttgaatttaactataat

SEQ ID NO: 1782 - DNA, 200 bp, Conyza canadensis
attatagttaaattcaactagcatggtacctgcgtaatgcggcggtaatcgtgacgatgacagtgtggtggtggcgatagttggtagtgaaggcgacgtcgagtggtgtagataattgatgtaaagagttaatggagatattttaaaaaataaaggattgatagtgtaatttaatcactaatgttaacggatagtgtatg

SEQ ID NO: 1783 - DNA, 200 bp, Conyza canadensis
catgctagttgaatttaactataataactatgaagtgaagttgaattaatcaaagttatgaaagacgaaaaaacttcactcactaaaaacaatagaaaccttattctttttacaagtgaattttacctcaaacgtgtatgatgtatgcaaatcgcacaacgaatgggtcccgcactaagcggatcttaaatagtttttct

SEQ ID NO: 1784 - DNA, 200 bp, Conyza canadensis
agaaaaactatttaagatccgcttagtgcgggacccattcgttgtgcgatttgcatacatcatacacgtttgaggtaaaattcacttgtaaaaagaataaggtttctattgtttttagtgagtgaagttttttcgtctttcataactttgattaattcaacttcacttcatagttattatagttaaattcaactagcatg

SEQ ID NO: 1785 - DNA, 200 bp, Conyza canadensis
taagcggatcttaaatagtttttctcaccataacacctccttaattagaaaatatcgtcgaggagaacctaccaaaactcgaactcaagatcttggaataaattctccggaggccccgcatagcaggtttagtgaaacaccactggccataaacgaaatgtaaataatttatttcaaatcgtataaattagaaaaagcaa

SEQ ID NO: 1786 - DNA, 200 bp, Conyza canadensis
ttgctttttctaatttatacgatttgaaataaattatttacatttcgtttatggccagtggtgtttcactaaacctgctatgcggggcctccggagaatttattccaagatcttgagttcgagttttggtaggttctcctcgacgatattttctaattaaggaggtgttatggtgagaaaaactatttaagatccgctta

SEQ ID NO: 1787 - DNA, 200 bp, Conyza canadensis
aaatcgtataaattagaaaaagcaacacgtttggcaaagtttcatttccctggtattatttataagttttcattaatattccaacaactaaaaatggtaatgatgaggagttatcaacgaatgtcaaaactaaattcatttgtatactcacaatcaaatattaatcaaaacaaatctttaatattatatatcatcactag

SEQ ID NO: 1788 - DNA, 200 bp, Conyza canadensis
ctagtgatgatatataatattaaagatttgttttgattaatatttgattgtgagtatacaaatgaatttagttttgacattcgttgataactcctcatcattaccatttttagttgttggaatattaatgaaaacttataaataataccagggaaatgaaactttgccaaacgtgttgctttttctaatttatacgattt

SEQ ID NO: 1789 - DNA, 200 bp, Conyza canadensis
gattcaaatcccacatttactacgtgttttctcaaccaaaatcccccccgcccccccacaaaacacacaatggcagttcacatcaacaactccaacatacccattttcaacacttccaatctcacaacccaaaacccatcttcaaagtcatcatcttttttatcttttggatccaacttcaaaaacccattaaaaaacaa

SEQ ID NO: 1790 - DNA, 200 bp, Conyza canadensis
ttgttttttaatgggtttttgaagttggatccaaaagataaaaaagatgatgactttgaagatgggttttgggttgtgagattggaagtgttgaaaatgggtatgttggagttgttgatgtgaactgccattgtgtgttttgtgggggggcgggggggattttggttgagaaaacacgtagtaaatgtgggatttgaatc

SEQ ID NO: 1791 - DNA, 200 bp, Conyza canadensis
acttcaaaaacccattaaaaaacaataataacaataattatacctctgtttcttgtaatgtgaaaaacaacaaaaacccatttaaagtatcagctttctctgccacttccaccaaagagaagccatctaaagctccagaagaaattgtgttgaaacccattcaagaaatttcgggtacggtccatttacccggatccaag

SEQ ID NO: 1792 - DNA, 200 bp, Conyza canadensis
cttggatccgggtaaatggaccgtacccgaaatttcttgaatgggtttcaacacaatttcttctggagctttagatggcttctctttggtggaagtggcagagaaagctgatactttaaatgggtttttgttgtttttcacattacaagaaacagaggtataattattgttattattgttttttaatgggtttttgaagt

SEQ ID NO: 1793 - DNA, 200 bp, Conyza canadensis
tacggtccatttacccggatccaagtctttatctaatcggatcctcctccttgctgccctgtctgaggggactactgttgtagacaacttgttaaacagtgatgatgttcattacatgcttggagctttaagagctctagggttaaatgttgaagaaaatagtgcaattaaaagagcaatcgtagaaggttgtggtggtg

SEQ ID NO: 1794 - DNA, 200 bp, Conyza canadensis
caccaccacaaccttctacgattgctcttttaattgcactattttcttcaacatttaaccctagagctcttaaagctccaagcatgtaatgaacatcatcactgtttaacaagttgtctacaacagtagtcccctcagacagggcagcaaggaggaggatccgattagataaagacttggatccgggtaaatggaccgta

SEQ ID NO: 1795 - DNA, 200 bp, Conyza canadensis
gcaatcgtagaaggttgtggtggtgtatttcccgtgggtaaagaagccaaggatgaaatccagctttttcttggaaatgcaggaacagctatgcgtccattgactgctgccgttactgctgccggtggaaactcaagctacatactagatggtgttcctcgaatgagggagaggccaattggtgatctggtcaccggtct

SEQ ID NO: 1796 - DNA, 200 bp, Conyza canadensis
agaccggtgaccagatcaccaattggcctctccctcattcgaggaacaccatctagtatgtagcttgagtttccaccggcagcagtaacggcagcagtcaatggacgcatagctgttcctgcatttccaagaaaaagctggatttcatccttggcttctttacccacgggaaatacaccaccacaaccttctacgattgc

SEQ ID NO: 1797 - DNA, 200 bp, Conyza canadensis
caattggtgatctggtcaccggtctaaaacaacttggtgcaaatgttgattgttctctcggtacaaactgcccaccagttcgtgtagttggaagtggaggccttcctggtggaaaggtgaaattgtcaggatctataagtagccaatacttgacttctttgctcatggcagctccccttgcactgggagacgtagagata

SEQ ID NO: 1798 - DNA, 200 bp, Conyza canadensis
tatctctacgtctcccagtgcaaggggagctgccatgagcaaagaagtcaagtattggctacttatagatcctgacaatttcacctttccaccaggaaggcctccacttccaactacacgaactggtgggcagtttgtaccgagagaacaatcaacatttgcaccaagttgttttagaccggtgaccagatcaccaattg

SEQ ID NO: 1799 - DNA, 200 bp, Conyza canadensis
ccttgcactgggagacgtagagatagaaattatagataaattgatctctgtgccatatgtacggatgacactgaagttgatgcaacggtttggggtttcagtagaacacagtgatactttggacagattccatgtccgaggcggtcaaaagtacaagtcacctggaaatgcttatgtggaaggtgatgcttcaagtgcga

SEQ ID NO: 1800 - DNA, 200 bp, Conyza canadensis
tcgcacttgaagcatcaccttccacataagcatttccaggtgacttgtacttttgaccgcctcggacatggaatctgtccaaagtatcactgtgttctactgaaaccccaaaccgttgcatcaacttcagtgtcatccgtacatatggcacagagatcaatttatctataatttctatctctacgtctcccagtgcaagg

SEQ ID NO: 1801 - DNA, 200 bp, Conyza canadensis
gtggaaggtgatgcttcaagtgcgagttacttcttagctggtgctgccatcactggcggaactgtcaccgtggaaggttgcgggacaagcagtttacagggtgatgtaaaatttgctgaggtccttggacaaatgggtgctgaagtaacctggacagagaactctgtcacggtgaagggtccgccaaggaattcttccgg

SEQ ID NO: 1802 - DNA, 200 bp, Conyza canadensis
ccggaagaattccttggcggacccttcaccgtgacagagttctctgtccaggttacttcagcacccatttgtccaaggacctcagcaaattttacatcaccctgtaaactgcttgtcccgcaaccttccacggtgacagttccgccagtgatggcagcaccagctaagaagtaactcgcacttgaagcatcaccttccac

SEQ ID NO: 1803 - DNA, 200 bp, Conyza canadensis
agggtccgccaaggaattcttccggaaggggacacttgcgtccagtagatgtgaacatgaacaaaatgccagatgttgcgatgactcttgctgtggttgccctttatgctgatggtccccactgccattagagacgtggctagctggagagtaaaagaaacggaaaggatgattgccatctgcacagaactaagaaagtt

SEQ ID NO: 1804 - DNA, 200 bp, Conyza canadensis
aactttcttagttctgtgcagatggcaatcatcctttccgtttcttttactctccagctagccacgtctctaatggcagtggggaccatcagcataaagggcaaccacagcaagagtcatcgcaacatctggcattttgttcatgttcacatctactggacgcaagtgtccccttccggaagaattccttggcggaccct

SEQ ID NO: 1805 - DNA, 200 bp, Conyza canadensis
ccatctgcacagaactaagaaagttgggagcaacagtcgaagaaggtccagattattgtgtgatcactccaccagagaaattgaatgtgacagcaatcgacacatacgatgatcacagaatggccatggctttctcgcttgccgcctgtgcagaggttcctgtcaccattaaggacccgggttgcacccgtaagaccttc

SEQ ID NO: 1806 - DNA, 200 bp, Conyza canadensis
gaaggtcttacgggtgcaacccgggtccttaatggtgacaggaacctctgcacaggcggcaagcgagaaagccatggccattctgtgatcatcgtatgtgtcgattgctgtcacattcaatttctctggtggagtgatcacacaataatctggaccttcttcgactgttgctcccaactttcttagttctgtgcagatgg

SEQ ID NO: 1807 - DNA, 200 bp, Conyza canadensis
cccgggttgcacccgtaagaccttccccgactactttgaagttcttgaaagatacactaagcattaaatcacatataagatgttcagaaagaaaggggttagaggttttaaaatgacacctttacccttcagtccttcaccattatctttcttcagaaatgtttcacttacagagttacatcatatgtatatgggcgacc

SEQ ID NO: 1808 - DNA, 200 bp, Conyza canadensis
ggtcgcccatatacatatgatgtaactctgtaagtgaaacatttctgaagaaagataatggtgaaggactgaagggtaaaggtgtcattttaaaacctctaacccctttctttctgaacatcttatatgtgatttaatgcttagtgtatctttcaagaacttcaaagtagtcggggaaggtcttacgggtgcaacccggg

SEQ ID NO: 1809 - DNA, 200 bp, Conyza canadensis
ggctggtgtcatggcttaataactgtratgacattttggtgatgcgtaagacctgtaagcaccagcacaagtctaagtcttgaatcttatacaaatasgtttttttctattttccaaatttattgagttttctcrtgagttcatgtatgagcattattgcatagtgaaaatatggtcagatggtttcatcgatgacaagc

SEQ ID NO: 1810 - DNA, 200 bp, Conyza canadensis
gcttgtcatcgatgaaaccatctgaccatattttcactatgcaataatgctcatacatgaactcaygagaaaactcaataaatttggaaaatagaaaaaaacstatttgtataagattcaagacttagacttgtgctggtgcttacaggtcttacgcatcaccaaaatgtcatyacagttattaagccatgacaccagcc

SEQ ID NO: 1811 - DNA, 200 bp, Conyza canadensis
tcagatggtttcatcgatgacaagctaatttttaagaaagatatattacttttctttttaacttcgggaaaatcataaaagtgaaatcatcgttttaactttttacgagcatggtactcgcgtaatgcagcggcggtggtatagaagacggtctaatggtggcagtgtcaagtggtgtaggtctatgtgcaccgaaactc

SEQ ID NO: 1812 - DNA, 200 bp, Conyza canadensis
gagtttcggtgcacatagacctacaccacttgacactgccaccattagaccgtcttctataccaccgccgctgcattacgcgagtaccatgctcgtaaaaagttaaaacgatgatttcacttttatgattttcccgaagttaaaaagaaaagtaatatatctttcttaaaaattagcttgtcatcgatgaaaccatctga

SEQ ID NO: 1813 - DNA, 200 bp, Conyza canadensis
tgtaggtctatgtgcaccgaaactccaaactgacatagccgtacccatttccgaaactccatggaaacgttttctcttacgaaacacgtatgaaacattccctaaaattttctatagattaaacgtttctttgaagtttccatacggtttctaattaatatcaaggttttaaaggactttttcgaatccccaaacccaaa

SEQ ID NO: 1814 - DNA, 200 bp, Conyza canadensis
tttgggtttggggattcgaaaaagtcctttaaaaccttgatattaattagaaaccgtatggaaacttcaaagaaacgtttaatctatagaaaattttagggaatgtttcatacgtgtttcgtaagagaaaacgtttccatggagtttcggaaatgggtacggctatgtcagtttggagtttcggtgcacatagacctaca

SEQ ID NO: 1815 - DNA, 200 bp, Conyza canadensis
actttttcgaatccccaaacccaaacatgttatattatatacaatttgatcaacattaaattttttatattacaaagccattattaaacactaaacattcaatgagtgatcactaatcaaacatgtattataaagttctacatatataattatacataatctctcaagtctcaaatctcctttatgaaaaaattgatata

SEQ ID NO: 1816 - DNA, 200 bp, Conyza canadensis
tatatcaattttttcataaaggagatttgagacttgagagattatgtataattatatatgtagaactttataatacatgtttgattagtgatcactcattgaatgtttagtgtttaataatggctttgtaatataaaaaatttaatgttgatcaaattgtatataatataacatgtttgggtttggggattcgaaaaagt

SEQ ID NO: 1817 - DNA, 200 bp, Conyza canadensis
tctcctttatgaaaaaattgatataatttatatttgtatattttttttattgttgtacccgtatcctggattttttagttttactgttccccgttcccgtattgttcccgtacccttttcccgtacctgtttcggtgctacataggtgtaggttgatgtaattgtgatagtgaaaagttttagaagataagagtttaaag

SEQ ID NO: 1818 - DNA, 200 bp, Conyza canadensis
ctttaaactcttatcttctaaaacttttcactatcacaattacatcaacctacacctatgtagcaccgaaacaggtacgggaaaagggtacgggaacaatacgggaacggggaacagtaaaactaaaaaatccaggatacgggtacaacaataaaaaaaatatacaaatataaattatatcaattttttcataaaggaga

SEQ ID NO: 1819 - DNA, 200 bp, Conyza canadensis
agttttagaagataagagtttaaagtgttaagtattaaaataagggtttatggtgtaaattaattcattaaggggaaaatttataaaactatttctatagtgggtttttattaagagacaatttagtaattttatatgtgacatatgagtaactatttttattttgagaggggtgcataatttttattcgaagagtacgg

SEQ ID NO: 1820 - DNA, 200 bp, Conyza canadensis
ccgtactcttcgaataaaaattatgcacccctctcaaaataaaaatagttactcatatgtcacatataaaattactaaattgtctcttaataaaaacccactatagaaatagttttataaattttccccttaatgaattaatttacaccataaacccttattttaatacttaacactttaaactcttatcttctaaaact

SEQ ID NO: 1821 - DNA, 200 bp, Conyza canadensis
cataatttttattcgaagagtacggataaaagtcaataaattacgagcagtgaagtatcccagacaccccttgcaaggtaattttttaaaattttattcatggaggtttggtaggaagtggtggtggtggtggttggtatgaaattttgtttttgaccttcttcaaacatccacctactactgacccctcccttcaaacc

SEQ ID NO: 1822 - DNA, 200 bp, Conyza canadensis
ggtttgaagggaggggtcagtagtaggtggatgtttgaagaaggtcaaaaacaaaatttcataccaaccaccaccaccaccacttcctaccaaacctccatgaataaaattttaaaaaattaccttgcaaggggtgtctgggatacttcactgctcgtaatttattgacttttatccgtactcttcgaataaaaattatg

SEQ ID NO: 1823 - DNA, 200 bp, Conyza canadensis
tactactgacccctcccttcaaacccaacccaaaatccaaatcattaaatccttcaaacccactgtgtgttttgtgtgaaatttcacacacaacaaacaatggcagctactcacattaacaccaccaacattgcccacaatctccaagctaccaccagtctttccaaaacccaaaccccatcaataaagtcacaaccttt

SEQ ID NO: 1824 - DNA, 200 bp, Conyza canadensis
aaaggttgtgactttattgatggggtttgggttttggaaagactggtggtagcttggagattgtgggcaatgttggtggtgttaatgtgagtagctgccattgtttgttgtgtgtgaaatttcacacaaaacacacagtgggtttgaaggatttaatgatttggattttgggttgggtttgaagggaggggtcagtagta

SEQ ID NO: 1825 - DNA, 200 bp, Conyza canadensis
ccccatcaataaagtcacaaccttttttatcttttgggccaaaacacaaaaacccgattgcccatttctctgtttcttctaataataatagaaatcttggaaaaaaatgtttaatagtttctgccgttgccaccaccgagaaaccgtcaacggtgccggaaattgtgttacaacccattaaagaaatctcgggtacggtt

SEQ ID NO: 1826 - DNA, 200 bp, Conyza canadensis
aaccgtacccgagatttctttaatgggttgtaacacaatttccggcaccgttgacggtttctcggtggtggcaacggcagaaactattaaacatttttttccaagatttctattattattagaagaaacagagaaatgggcaatcgggtttttgtgttttggcccaaaagataaaaaaggttgtgactttattgatgggg

SEQ ID NO: 1827 - DNA, 200 bp, Conyza canadensis
cattaaagaaatctcgggtacggttaatttacccgggtccaagtcgttgtctaatcggatcctcctccttgctgcgcttgctgaggtatagtttaatttggtaataatgtttgacctttaaaatttgacatttgggctacatgattgatatgggtcttgaatgaattgtgttataaaatttgggaagttaaatgttaata

SEQ ID NO: 1828 - DNA, 200 bp, Conyza canadensis
tattaacatttaacttcccaaattttataacacaattcattcaagacccatatcaatcatgtagcccaaatgtcaaattttaaaggtcaaacattattaccaaattaaactatacctcagcaagcgcagcaaggaggaggatccgattagacaacgacttggacccgggtaaattaaccgtacccgagatttctttaatg

SEQ ID NO: 1829 - DNA, 200 bp, Conyza canadensis
aaatttgggaagttaaatgttaataatagtttaatcctttagaaattatgaagtaatggttttagaccctgaatttttttttattgcataggttagtcccttagctagttagcttttggttgacatcttagaaaaaccagtacagtttttatattttagtccttaagcttcaattttttgcaatgtattgccatttgaaa

SEQ ID NO: 1830 - DNA, 200 bp, Conyza canadensis
tttcaaatggcaatacattgcaaaaaattgaagcttaaggactaaaatataaaaactgtactggtttttctaagatgtcaaccaaaagctaactagctaagggactaacctatgcaataaaaaaaaattcagggtctaaaaccattacttcataatttctaaaggattaaactattattaacatttaacttcccaaattt

SEQ ID NO: 1831 - DNA, 200 bp, Conyza canadensis
ttttgcaatgtattgccatttgaaatgatctagtaaaatgttcaaaatcaatgaattggcggtttaaagatataatgcttggatcaattgttatgtaaagtgtgctaggcggtcaaaagcgaatcttggatcaaggaagtcgtagaatactattgatttcatattattgatttcttattatgcatatttgacatgtgctt

SEQ ID NO: 1832 - DNA, 200 bp, Conyza canadensis
aagcacatgtcaaatatgcataataagaaatcaataatatgaaatcaatagtattctacgacttccttgatccaagattcgcttttgaccgcctagcacactttacataacaattgatccaagcattatatctttaaaccgccaattcattgattttgaacattttactagatcatttcaaatggcaatacattgcaaaa

SEQ ID NO: 1833 - DNA, 200 bp, Conyza canadensis
tattatgcatatttgacatgtgcttctaacatcatggcatttgggatttatttctatatataaagcatgactgtatggttataaagttcaaaacttgtatggtataaatatactcttcttacttcttagcaggaatgtgttgacttataagctgaaaacttttataactccaattgtgtgtagtaatacttgaaagtggc

SEQ ID NO: 1834 - DNA, 200 bp, Conyza canadensis
gccactttcaagtattactacacacaattggagttataaaagttttcagcttataagtcaacacattcctgctaagaagtaagaagagtatatttataccatacaagttttgaactttataaccatacagtcatgctttatatatagaaataaatcccaaatgccatgatgttagaagcacatgtcaaatatgcataata

SEQ ID NO: 1835 - DNA, 200 bp, Conyza canadensis
gtgtgtagtaatacttgaaagtggctgagttcctaggacagtattacatgcgaacactacaacgtgttactaaatttgagataggtatgatttggttttgttggatacaaagtctaggtcagttaacatagccagttgaggacgatagctttcttgtcttatttcctttttatagagggtttgtgtttcgtgatggtaat

SEQ ID NO: 1836 - DNA, 200 bp, Conyza canadensis
attaccatcacgaaacacaaaccctctataaaaaggaaataagacaagaaagctatcgtcctcaactggctatgttaactgacctagactttgtatccaacaaaaccaaatcatacctatctcaaatttagtaacacgttgtagtgttcgcatgtaatactgtcctaggaactcagccactttcaagtattactacacac

SEQ ID NO: 1837 - DNA, 200 bp, Conyza canadensis
agggtttgtgtttcgtgatggtaatattgagtaccaccatatagttcacaagtcatataataaaatcagagcaacattcgaggagtcgcctatatgcatattattgcaccatgctaaaatccaagggcatattttgatgccaatttgtaatttatttctcagggaacgaccattgttgacaacttactcaacagtgatga

SEQ ID NO: 1838 - DNA, 200 bp, Conyza canadensis
tcatcactgttgagtaagttgtcaacaatggtcgttccctgagaaataaattacaaattggcatcaaaatatgcccttggattttagcatggtgcaataatatgcatataggcgactcctcgaatgttgctctgattttattatatgacttgtgaactatatggtggtactcaatattaccatcacgaaacacaaaccct

SEQ ID NO: 1839 - DNA, 200 bp, Conyza canadensis
ttgacaacttactcaacagtgatgatgttcattacatgcttggagctttaagaactctagggctaaacgttgaggaggatgttgcaattaaaagggcaattgtggaaggttgtggcggtgtgtttcctgtgggtaaagaagctaaagatgacatacagctttttcttgggaatgcaggaactgctatgcgtccattgact

SEQ ID NO: 1840 - DNA, 200 bp, Conyza canadensis
agtcaatggacgcatagcagttcctgcattcccaagaaaaagctgtatgtcatctttagcttctttacccacaggaaacacaccgccacaaccttccacaattgcccttttaattgcaacatcctcctcaacgtttagccctagagttcttaaagctccaagcatgtaatgaacatcatcactgttgagtaagttgtcaa

SEQ ID NO: 1841 - DNA, 200 bp, Conyza canadensis
aggaactgctatgcgtccattgactgccgcagttactgctgctggtggtaattcaaggtatttggacgttgtcattgactcattgctatagtaaatatatgttgacttgtgcacacaagatttgaagcatcttttaaacatatatgattagatacagagaacactgcatgttgaaaacttgaaatacaggactttcttaa

SEQ ID NO: 1842 - DNA, 200 bp, Conyza canadensis
ttaagaaagtcctgtatttcaagttttcaacatgcagtgttctctgtatctaatcatatatgtttaaaagatgcttcaaatcttgtgtgcacaagtcaacatatatttactatagcaatgagtcaatgacaacgtccaaataccttgaattaccaccagcagcagtaactgcggcagtcaatggacgcatagcagttcct

SEQ ID NO: 1843 - DNA, 200 bp, Conyza canadensis
aacttgaaatacaggactttcttaaaatattgggatttcacatatatgggttgaatagttgaaatttcctccttctacctttaaccaattgtatattacttatttaaagttgtgttttaaacatggcgatatgattagatacagagaacactacttattgaaaggtttatgtggtatagtatgaattttaacctcaaaaa

SEQ ID NO: 1844 - DNA, 200 bp, Conyza canadensis
tttttgaggttaaaattcatactataccacataaacctttcaataagtagtgttctctgtatctaatcatatcgccatgtttaaaacacaactttaaataagtaatatacaattggttaaaggtagaaggaggaaatttcaactattcaacccatatatgtgaaatcccaatattttaagaaagtcctgtatttcaagtt

SEQ ID NO: 1845 - DNA, 200 bp, Conyza canadensis
atagtatgaattttaacctcaaaaagggtatctcactatctcttcatatagaagcacacatctgattctgttatatctttatggatcattttttccagctacatactagatggcgttcctcgtatgagagagagaccaataggtgatttggtcacgggtcttaagcagcttggggcagatgttgactgttctctcgggac

SEQ ID NO: 1846 - DNA, 200 bp, Conyza canadensis
gtcccgagagaacagtcaacatctgccccaagctgcttaagacccgtgaccaaatcacctattggtctctctctcatacgaggaacgccatctagtatgtagctggaaaaaatgatccataaagatataacagaatcagatgtgtgcttctatatgaagagatagtgagataccctttttgaggttaaaattcatactat

SEQ ID NO: 1847 - DNA, 200 bp, Conyza canadensis
cagatgttgactgttctctcgggacgaactgccctcccgtgcgtgtagttggtggaggtggtctccctggaggaaaggtattgtgttttcattagtagttgttttctatgcaaatagcaacacaccttatatatcatccatttatagctatttttctaattggggcgtacgttactgtaatttgatcgtccaaccagttg

SEQ ID NO: 1848 - DNA, 200 bp, Conyza canadensis
caactggttggacgatcaaattacagtaacgtacgccccaattagaaaaatagctataaatggatgatatataaggtgtgttgctatttgcatagaaaacaactactaatgaaaacacaatacctttcctccagggagaccacctccaccaactacacgcacgggagggcagttcgtcccgagagaacagtcaacatctg

SEQ ID NO: 1849 - DNA, 200 bp, Conyza canadensis
tgtaatttgatcgtccaaccagttgtcatgaccctccttagctaaaatggatgaaagctggtccgacaattgaccataataaatgggtgtgggctatcttgctaaatttaagtatttcacttaaaatgagagttggtttacagtgtgcattcaacctaatttttttttttaacgtcgcatacaacctaaaattgaataat

SEQ ID NO: 1850 - DNA, 200 bp, Conyza canadensis
attattcaattttaggttgtatgcgacgttaaaaaaaaaaattaggttgaatgcacactgtaaaccaactctcattttaagtgaaatacttaaatttagcaagatagcccacacccatttattatggtcaattgtcggaccagctttcatccattttagctaaggagggtcatgacaactggttggacgatcaaattaca

SEQ ID NO: 1851 - DNA, 200 bp, Conyza canadensis
cgcatacaacctaaaattgaataatgttgtagacacaaaagctcttagtgagctttaatagtaacattagaggtggtgatatcaatcaaacaataagggaaaagtaatatgtataaaaattagaattaaacaagaagttttaaaaaatagatcaaatggtttgaaagtcttctaaagtgtaatttaatgcataaatcttc

SEQ ID NO: 1852 - DNA, 200 bp, Conyza canadensis
gaagatttatgcattaaattacactttagaagactttcaaaccatttgatctattttttaaaacttcttgtttaattctaatttttatacatattacttttcccttattgtttgattgatatcaccacctctaatgttactattaaagctcactaagagcttttgtgtctacaacattattcaattttaggttgtatgcg

SEQ ID NO: 1853 - DNA, 200 bp, Conyza canadensis
agtgtaatttaatgcataaatcttcctaaattattttatttaaaaactgtattgtaatataattttcatcatcatatttgacattctatgaaaacaaatatacattttgaacaaacagtgttacggatcgacccaggcaattcaaagctgtccattctaacctaaaccagttttcacggttacctctattttcctgcctt

SEQ ID NO: 1854 - DNA, 200 bp, Conyza canadensis
aaggcaggaaaatagaggtaaccgtgaaaactggtttaggttagaatggacagctttgaattgcctgggtcgatccgtaacactgtttgttcaaaatgtatatttgttttcatagaatgtcaaatatgatgatgaaaattatattacaatacagtttttaaataaaataatttaggaagatttatgcattaaattacact

SEQ ID NO: 1855 - DNA, 200 bp, Conyza canadensis
acggttacctctattttcctgcctttcaatttgccagctacaagaagcttcattccaccataacgggttcacgctaaagatgcaaagagtcatgattcgttatttattatcttgacttattatgataacaatagttttggtgtattttgatgtcttcaggttaagttgtcgggatctattagtagtcaataccttactgc

SEQ ID NO: 1856 - DNA, 200 bp, Conyza canadensis
gcagtaaggtattgactactaatagatcccgacaacttaacctgaagacatcaaaatacaccaaaactattgttatcataataagtcaagataataaataacgaatcatgactctttgcatctttagcgtgaacccgttatggtggaatgaagcttcttgtagctggcaaattgaaaggcaggaaaatagaggtaaccgt

SEQ ID NO: 1857 - DNA, 200 bp, Conyza canadensis
ctattagtagtcaataccttactgctctgcttatggcttctccccttgcccttggggacgtggaaattgaaatcatagataaactaatttccataccatatgtcgagatgacactgaaattaatggaacggttcggcgtctcggtagaacatagtgatagttgggaccagttctttattcgaggcggccaaaagtacaag

SEQ ID NO: 1858 - DNA, 200 bp, Conyza canadensis
cttgtacttttggccgcctcgaataaagaactggtcccaactatcactatgttctaccgagacgccgaaccgttccattaatttcagtgtcatctcgacatatggtatggaaattagtttatctatgatttcaatttccacgtccccaagggcaaggggagaagccataagcagagcagtaaggtattgactactaatag

SEQ ID NO: 1859 - DNA, 200 bp, Conyza canadensis
tattcgaggcggccaaaagtacaagtaagtctatttctttctttttaaagtaaaactggaatttaaaaaggttgcagtttctaccctatctcttgtaatgggttgattcaggttatgtataatctctaatgggtcaaagggggtaaaatacaaaaaggttattttgtcaccaaaacgatatgatgcatattacctagttt

SEQ ID NO: 1860 - DNA, 200 bp, Conyza canadensis
aaactaggtaatatgcatcatatcgttttggtgacaaaataacctttttgtattttaccccctttgacccattagagattatacataacctgaatcaacccattacaagagatagggtagaaactgcaacctttttaaattccagttttactttaaaaagaaagaaatagacttacttgtacttttggccgcctcgaata

SEQ ID NO: 1861 - DNA, 200 bp, Conyza canadensis
cgatatgatgcatattacctagttttcttattggaatagtaaacatttttaatcatttcaatgtacaactcttttatgtgtccacagaaattaaacatagcccctaggactatgttcatcatttccctttataaactagttggagaaaagtattttggccaacccattccgaatttacacattttggcctatcacccagc

SEQ ID NO: 1862 - DNA, 200 bp, Conyza canadensis
gctgggtgataggccaaaatgtgtaaattcggaatgggttggccaaaatacttttctccaactagtttataaagggaaatgatgaacatagtcctaggggctatgtttaatttctgtggacacataaaagagttgtacattgaaatgattaaaaatgtttactattccaataagaaaactaggtaatatgcatcatatcg

SEQ ID NO: 1863 - DNA, 200 bp, Conyza canadensis
tacacattttggcctatcacccagcccgtctgtccactcattttcagggttttgtatggagacccgtttgttaattagttggattaattatcttcaggtcacctggaaatgcttatgtagaaggtgatgcgtcaagtgcgagttacttcttggctggtgctgccataaccggaggcaccatcaccgttgaaggctgcgga

SEQ ID NO: 1864 - DNA, 200 bp, Conyza canadensis
tccgcagccttcaacggtgatggtgcctccggttatggcagcaccagccaagaagtaactcgcacttgacgcatcaccttctacataagcatttccaggtgacctgaagataattaatccaactaattaacaaacgggtctccatacaaaaccctgaaaatgagtggacagacgggctgggtgataggccaaaatgtgta

SEQ ID NO: 1865 - DNA, 200 bp, Conyza canadensis
caccatcaccgttgaaggctgcggaacaagtagtctgcaggtgcactttgacctcctttgttttttattcttctcgatttcaatcaaacggctttacggttttacattttaaatggattttgtggaaacaacgagtattaaaagttcatcaaaagattttattattatttttatgcaacaattatcagcatctgtagtga

SEQ ID NO: 1866 - DNA, 200 bp, Conyza canadensis
tcactacagatgctgataattgttgcataaaaataataataaaatcttttgatgaacttttaatactcgttgtttccacaaaatccatttaaaatgtaaaaccgtaaagccgtttgattgaaatcgagaagaataaaaaacaaaggaggtcaaagtgcacctgcagactacttgttccgcagccttcaacggtgatggtg

SEQ ID NO: 1867 - DNA, 200 bp, Conyza canadensis
caacaattatcagcatctgtagtgaaatattcagaagtccgtttttagttcaaagtttttctttttaaccttaaagtcaaaagtgagatggcaaatcttttacgtaaaatgattcaattgaggctgtactttggtcgattctgacttaattgggaacataggttacgttagctataagcctataactataagtaagcatg

SEQ ID NO: 1868 - DNA, 200 bp, Conyza canadensis
catgcttacttatagttataggcttatagctaacgtaacctatgttcccaattaagtcagaatcgaccaaagtacagcctcaattgaatcattttacgtaaaagatttgccatctcacttttgactttaaggttaaaaagaaaaactttgaactaaaaacggacttctgaatatttcactacagatgctgataattgttg

SEQ ID NO: 1869 - DNA, 200 bp, Conyza canadensis
aagcctataactataagtaagcatgtgtttatatgtcacaatgacttgattaaaagtaaccttatgattttcttagtatacgttagtaatctaacagtatcataataacggacaaaaatgtgctggtggatcagcccacccagcccgttagaacatgacataaaaatgacccaacttgacctatcacctaagctcattat

SEQ ID NO: 1870 - DNA, 200 bp, Conyza canadensis
ataatgagcttaggtgataggtcaagttgggtcatttttatgtcatgttctaacgggctgggtgggctgatccaccagcacatttttgtccgttattatgatactgttagattactaacgtatactaagaaaatcataaggttacttttaatcaagtcattgtgacatataaacacatgcttacttatagttataggctt

SEQ ID NO: 1871 - DNA, 200 bp, Conyza canadensis
ttgacctatcacctaagctcattataatatgttatccaacccaccctatcttggccacctgtgacctgtattcaaatgtatactgtaaagcaacttcctgtttttcttaaaacatgtattctgttttttctttccaatgaaagggtgatgtgaagtttgcggaggtacttggacaaatgggtgcggaagtaacatggact

SEQ ID NO: 1872 - DNA, 200 bp, Conyza canadensis
agtccatgttacttccgcacccatttgtccaagtacctccgcaaacttcacatcaccctttcattggaaagaaaaaacagaatacatgttttaagaaaaacaggaagttgctttacagtatacatttgaatacaggtcacaggtggccaagatagggtgggttggataacatattataatgagcttaggtgataggtcaa

SEQ ID NO: 1873 - DNA, 200 bp, Conyza canadensis
aatgggtgcggaagtaacatggactgagaactcagtcacagttaagggcccaccaagggattcttctggaaggaaacatttacgtgctgttgatgtgaacatgaacaagatgcctgatgttgccatgactcttgctgtggtcgctctttatgctgatggccctacagccattagagatggtatccttccttttaatgtgg

SEQ ID NO: 1874 - DNA, 200 bp, Conyza canadensis
ccacattaaaaggaaggataccatctctaatggctgtagggccatcagcataaagagcgaccacagcaagagtcatggcaacatcaggcatcttgttcatgttcacatcaacagcacgtaaatgtttccttccagaagaatcccttggtgggcccttaactgtgactgagttctcagtccatgttacttccgcacccatt

SEQ ID NO: 1875 - DNA, 200 bp, Conyza canadensis
gatggtatccttccttttaatgtggaaaaaagttcaacatgttttcactaagttttcaaagtaaatagatagatatgacttcaaaataactctattgccatgttaaatcttacacatattgcaagcacattctagtggtggtttggaatggcattatgaaattgaatatctaaaatatttaatttaaacatgttcggttt

SEQ ID NO: 1876 - DNA, 200 bp, Conyza canadensis
aaaccgaacatgtttaaattaaatattttagatattcaatttcataatgccattccaaaccaccactagaatgtgcttgcaatatgtgtaagatttaacatggcaatagagttattttgaagtcatatctatctatttactttgaaaacttagtgaaaacatgttgaacttttttccacattaaaaggaaggataccatc

SEQ ID NO: 1877 - DNA, 200 bp, Conyza canadensis
tatttaatttaaacatgttcggtttctgatcatttagggtcagttttaactgaatctcagagaagtcgcgcaagacatgtcacatatttgtttctccgagtctcagacaactgctttttcaaaatgaaagcattctagaactattttgcttacagttgattttctaattctgggtgtacataaatcaagataattacttt

SEQ ID NO: 1878 - DNA, 200 bp, Conyza canadensis
aaagtaattatcttgatttatgtacacccagaattagaaaatcaactgtaagcaaaatagttctagaatgctttcattttgaaaaagcagttgtctgagactcggagaaacaaatatgtgacatgtcttgcgcgacttctctgagattcagttaaaactgaccctaaatgatcagaaaccgaacatgtttaaattaaata

SEQ ID NO: 1879 - DNA, 200 bp, Conyza canadensis
gtacataaatcaagataattacttttataaaacacattcaaaaagcctcctagatgcccctattatgaattttctgtttgctatacgagtatctgctttgtttttgaaaatggtttttttgttttttgccagttgctagctggagagttaaagaaaccgaaaggatgattgccatttgcacagaacttagaaaggtaaaa

SEQ ID NO: 1880 - DNA, 200 bp, Conyza canadensis
ttttacctttctaagttctgtgcaaatggcaatcatcctttcggtttctttaactctccagctagcaactggcaaaaaacaaaaaaaccattttcaaaaacaaagcagatactcgtatagcaaacagaaaattcataataggggcatctaggaggctttttgaatgtgttttataaaagtaattatcttgatttatgtac

SEQ ID NO: 1881 - DNA, 200 bp, Conyza canadensis
ttgcacagaacttagaaaggtaaaatgatactttgttactctgtgatctatgatactgctattgcttagaggtcactaaagtggtaaggtcaaataggatgggtttgaatgggaacacttttcgcccaaaacatatttaactaatataatttcacttgttactatctaatttcataaatgaaatgatttagaattagaat

SEQ ID NO: 1882 - DNA, 200 bp, Conyza canadensis
attctaattctaaatcatttcatttatgaaattagatagtaacaagtgaaattatattagttaaatatgttttgggcgaaaagtgttcccattcaaacccatcctatttgaccttaccactttagtgacctctaagcaatagcagtatcatagatcacagagtaacaaagtatcattttacctttctaagttctgtgcaa

SEQ ID NO: 1883 - DNA, 200 bp, Conyza canadensis
aaatgaaatgatttagaattagaatgttttgggtgtcttgcaacctattcattttaagctattttaattgtcttttgacccattagaaatatacataagaaatatacttaatcagtcctctattgttaatgtttatctggggtgaaatttcttcagttgggagcaacagttgaagaaggtccggactattgtgtgatcac

SEQ ID NO: 1884 - DNA, 200 bp, Conyza canadensis
gtgatcacacaatagtccggaccttcttcaactgttgctcccaactgaagaaatttcaccccagataaacattaacaatagaggactgattaagtatatttcttatgtatatttctaatgggtcaaaagacaattaaaatagcttaaaatgaataggttgcaagacacccaaaacattctaattctaaatcatttcattt

SEQ ID NO: 1885 - DNA, 200 bp, Conyza canadensis
aaggtccggactattgtgtgatcactccgccagagaagttaaacgtgacagcaatagacacatatgatgatcacaggatggccatggctttctctcttgccgcttgtgcagatgttcctgtgaccattaaggatccttcttgcacacgtaagacgtttcctgattactttgaagttcttcaaagatttgccaagcattaa

SEQ ID NO: 1886 - DNA, 200 bp, Conyza canadensis
ttaatgcttggcaaatctttgaagaacttcaaagtaatcaggaaacgtcttacgtgtgcaagaaggatccttaatggtcacaggaacatctgcacaagcggcaagagagaaagccatggccatcctgtgatcatcatatgtgtctattgctgtcacgtttaacttctctggcggagtgatcacacaatagtccggacctt

SEQ ID NO: 1887 - DNA, 200 bp, Conyza canadensis; identical to SEQ ID NO: 1457

SEQ ID NO: 1888 - DNA, 200 bp, Conyza canadensis; identical to SEQ ID NO: 1458

SEQ ID NO: 1889 - DNA, 200 bp, Conyza canadensis; identical to SEQ ID NO: 1459

SEQ ID NO: 1890 - DNA, 200 bp, Conyza canadensis; identical to SEQ ID NO: 1460

SEQ ID NO: 1891 - DNA, 200 bp, Conyza canadensis; identical to SEQ ID NO: 1461

SEQ ID NO: 1892 - DNA, 200 bp, Conyza canadensis; identical to SEQ ID NO: 1462

SEQ ID NO: 1893 - DNA, 200 bp, Conyza canadensis; identical to SEQ ID NO: 1463

SEQ ID NO: 1894 - DNA, 200 bp, Conyza canadensis; identical to SEQ ID NO: 1464

SEQ ID NO: 1895 - DNA, 200 bp, Conyza canadensis
gaggactaggattagtttagaggaatatggtagatcagtaatccttttaggtattttaggggtagtctatatacttatatgtaggaaggtcaggcatgatacctttcttatatgctcgtatactcgtaattgttgctctcagtccatttgcttggttttatgcaaacggttatgtttattatgtttttatactgatgtct

SEQ ID NO: 1896 - DNA, 200 bp, Conyza canadensis
agacatcagtataaaaacataataaacataaccgtttgcataaaaccaagcaaatggactgagagcaacaattacgagtatacgagcatataagaaaggtatcatgcctgaccttcctacatataagtatatagactacccctaaaatacctaaaaggattactgatctaccatattcctctaaactaatcctagtcctc

SEQ ID NO: 1897 - DNA, 200 bp, Conyza canadensis
ttattatgtttttatactgatgtctaatatgttcaaatgtcctatctactatgtattgtccattttgcgctaaagtgtcctacgtggtatgtttgctactcccctttactcttaacgtaggcagctcatacccgaccgacaagtatggtttgcttaactctttacactctcctacttttgcatcatatggccggaggtcc

SEQ ID NO: 1898 - DNA, 200 bp, Conyza canadensis
ggacctccggccatatgatgcaaaagtaggagagtgtaaagagttaagcaaaccatacttgtcggtcgggtatgagctgcctacgttaagagtaaaggggagtagcaaacataccacgtaggacactttagcgcaaaatggacaatacatagtagataggacatttgaacatattagacatcagtataaaaacataataa

SEQ ID NO: 1899 - DNA, 200 bp, Conyza canadensis
ttttgcatcatatggccggaggtccttatggaagcagtctctctacctttgggtagaggcaagattgtctacatctcacctcccccataccctgctcactgtgttgtttagtttatttaaaggtggaaaggaaaggagatgagaggagaaatatataagatgcattcttaagatttttttaagtgtggaaagggaaggag

SEQ ID NO: 1900 - DNA, 200 bp, Conyza canadensis
ctccttccctttccacacttaaaaaaatcttaagaatgcatcttatatatttctcctctcatctcctttcctttccacctttaaataaactaaacaacacagtgagcagggtatgggggaggtgagatgtagacaatcttgcctctacccaaaggtagagagactgcttccataaggacctccggccatatgatgcaaaa

SEQ ID NO: 1901 - DNA, 200 bp, Conyza canadensis
tttttaagtgtggaaagggaaggagtagaaaggattagagggggaagttgatatggatctgcgggaagtttatattatttagtaatataatattaattttattattattatgattaggaaagtattgtctttacttagatatcttatgatrtcttttatattatttagttagcttgatcatcaagctataggattagtat

SEQ ID NO: 1902 - DNA, 200 bp, Conyza canadensis
atactaatcctatagcttgatgatcaagctaactaaataatataaaagayatcataagatatctaagtaaagacaatactttcctaatcataataataataaaattaatattatattactaaataatataaacttcccgcagatccatatcaacttccccctctaatcctttctactccttccctttccacacttaaaaa

SEQ ID NO: 1903 - DNA, 200 bp, Conyza canadensis
gatcatcaagctataggattagtataaaaagaatattagggttgtaattctaaagtatgaaatattaatcagaagtttattgttcttgtttaatcaatttaggagtttactggttctcgaataccagcctatctttgttattgttcttatcatttgatacaagccattggttcgtatcaattggtatcagagcatcgatc

SEQ ID NO: 1904 - DNA, 200 bp, Conyza canadensis
gatcgatgctctgataccaattgatacgaaccaatggcttgtatcaaatgataagaacaataacaaagataggctggtattcgagaaccagtaaactcctaaattgattaaacaagaacaataaacttctgattaatatttcatactttagaattacaaccctaatattctttttatactaatcctatagcttgatgatc

SEQ ID NO: 1905 - DNA, 200 bp, Conyza canadensis
atcaattggtatcagagcatcgatcttgcaacctgtgcttttcttcaactatggaatcaaggacgatcattgatgttgatgctgatgtacagcaataccgtgaatctactgaggcttgggtggacataatgcatgctcggatcaatcgttttcaagcagccaccgcgcgatctcagttggccactcaacaatttcacttg

SEQ ID NO: 1906 - DNA, 200 bp, Conyza canadensis
caagtgaaattgttgagtggccaactgagatcgcgcggtggctgcttgaaaacgattgatccgagcatgcattatgtccacccaagcctcagtagattcacggtattgctgtacatcagcatcaacatcaatgatcgtccttgattccatagttgaagaaaagcacaggttgcaagatcgatgctctgataccaattgat

SEQ ID NO: 1907 - DNA, 200 bp, Conyza canadensis
gttggccactcaacaatttcacttgaggtttacaactaggctggataaacttgaaccagttgtagttgggacacagcagaagttggatgcattggcggcagtggcaaaccagcctctaccccagcaaccgatgattcaggaagttgtcataccaacagtccctacaacttcaccaaaaacaaatcagtttgggttgaagc

SEQ ID NO: 1908 - DNA, 200 bp, Conyza canadensis
gcttcaacccaaactgatttgtttttggtgaagttgtagggactgttggtatgacaacttcctgaatcatcggttgctggggtagaggctggtttgccactgccgccaatgcatccaacttctgctgtgtcccaactacaactggttcaagtttatccagcctagttgtaaacctcaagtgaaattgttgagtggccaac

SEQ ID NO: 1909 - DNA, 200 bp, Conyza canadensis
aaaacaaatcagtttgggttgaagcaatcgaaggtttcacaagcagggtatccttatcccagacaccttcagatcttgcaaggaataatcatcctgatgtgaaccaagaacgaggagctggactaacattcaaggacataagcaatgcttatgaagatctggcaggcgatgaaaagcgatccatatatgacatgaatggg

SEQ ID NO: 1910 - DNA, 200 bp, Conyza canadensis
cccattcatgtcatatatggatcgcttttcatcgcctgccagatcttcataagcattgcttatgtccttgaatgttagtccagctcctcgttcttggttcacatcaggatgattattccttgcaagatctgaaggtgtctgggataaggataccctgcttgtgaaaccttcgattgcttcaacccaaactgatttgtttt

SEQ ID NO: 1911 - DNA, 200 bp, Conyza canadensis
gcgatccatatatgacatgaatggggagaatgggcttaaaggtacatgttttggtttaaggaattgtgcaaaagctgatgaactttctggtttgatacatatgattgagtttgttaaacaacttcgatatgatcagcaagctatggagtttcaagtcagaatttgggatcctggaattactcgaaggaacaatttaaagc

SEQ ID NO: 1912 - DNA, 200 bp, Conyza canadensis
gctttaaattgttccttcgagtaattccaggatcccaaattctgacttgaaactccatagcttgctgatcatatcgaagttgtttaacaaactcaatcatatgtatcaaaccagaaagttcatcagcttttgcacaattccttaaaccaaaacatgtacctttaagcccattctccccattcatgtcatatatggatcgc

SEQ ID NO: 1913 - DNA, 200 bp, Conyza canadensis
attactcgaaggaacaatttaaagcaacaccttgaggacaaggtgtttttggggtgggagtaatgatatggatctgctggaagtttatattatttagtattataatattaattttattattaatatgattaggaaagtattgtctttacttagatatcttatgatgtcttttatattatttagttagcttgatcatctag

SEQ ID NO: 1914 - DNA, 200 bp, Conyza canadensis
ctagatgatcaagctaactaaataatataaaagacatcataagatatctaagtaaagacaatactttcctaatcatattaataataaaattaatattataatactaaataatataaacttccagcagatccatatcattactcccaccccaaaaacaccttgtcctcaaggtgttgctttaaattgttccttcgagtaat

SEQ ID NO: 1915 - DNA, 200 bp, Conyza canadensis
ttatttagttagcttgatcatctagctataggattagtataaaaagaatattagggttgtaattctaaagtatgaaatattaatcagaagtttattgttcttgtttaatcaatttaggagtttactggttctcgaataccagcctatctttgttattgtttgatacaagccattggttcgtatcagaagtttagttgttt

SEQ ID NO: 1916 - DNA, 200 bp, Conyza canadensis
aaacaactaaacttctgatacgaaccaatggcttgtatcaaacaataacaaagataggctggtattcgagaaccagtaaactcctaaattgattaaacaagaacaataaacttctgattaatatttcatactttagaattacaaccctaatattctttttatactaatcctatagctagatgatcaagctaactaaataa

SEQ ID NO: 1917 - DNA, 200 bp, Conyza canadensis
gttcgtatcagaagtttagttgttttttgtctcaaaagttttcccctcatttttgaggtgattaggaaggaaaacttctcttccctctcatctcctttcctcccttaagttaactagacattaatgaatattgggtcattttgttgttgtggctataaggaatgacttgacttaaaaacttatagaaatgctgtgttatc

SEQ ID NO: 1918 - DNA, 200 bp, Conyza canadensis
gataacacagcatttctataagtttttaagtcaagtcattccttatagccacaacaacaaaatgacccaatattcattaatgtctagttaacttaagggaggaaaggagatgagagggaagagaagttttccttcctaatcacctcaaaaatgaggggaaaacttttgagacaaaaaacaactaaacttctgatacgaac

SEQ ID NO: 1919 - DNA, 200 bp, Conyza canadensis
aaacttatagaaatgctgtgttatccagtaagtaatcgtttttttactatttgtcttttaagaccattcattaagcacataaaacaaacaacaatcctgcttaatcgatgtagactacatacatgtagacggacattttatccataaacagctaattagtcatacatagccagttatatgttttacatcgtgcagtgtaa

SEQ ID NO: 1920 - DNA, 200 bp, Conyza canadensis
ttacactgcacgatgtaaaacatataactggctatgtatgactaattagctgtttatggataaaatgtccgtctacatgtatgtagtctacatcgattaagcaggattgttgtttgttttatgtgcttaatgaatggtcttaaaagacaaatagtaaaaaaacgattacttactggataacacagcatttctataagttt

SEQ ID NO: 1921 - DNA, 200 bp, Conyza canadensis
atatgttttacatcgtgcagtgtaaaacttctgcctttactgctaagattttttgtttacatatatattagatatattaaggtttgtattttgatgctaacatttaacattactttttttttttatcggggagtgggttaaagtggttcttctacctggttttagttttttagatgtatatccaatatttattgtgggta

SEQ ID NO: 1922 - DNA, 200 bp, Conyza canadensis
tacccacaataaatattggatatacatctaaaaaactaaaaccaggtagaagaaccactttaacccactccccgataaaaaaaaaaagtaatgttaaatgttagcatcaaaatacaaaccttaatatatctaatatatatgtaaacaaaaaatcttagcagtaaaggcagaagttttacactgcacgatgtaaaacatat

SEQ ID NO: 1923 - DNA, 200 bp, Conyza canadensis
gtatatccaatatttattgtgggtaatttaaagttttgaaatttttgtttttttttgtgaacagtataaagtttctgacttttttgattttttgtgaggtaaagtcgtgaatgtgtaatttggtatttgattgatattcttgatattggtacatagtgaggtgcaaggtgctgatggtttcttagacgggtcatgtttgt

SEQ ID NO: 1924 - DNA, 200 bp, Conyza canadensis
acaaacatgacccgtctaagaaaccatcagcaccttgcacctcactatgtaccaatatcaagaatatcaatcaaataccaaattacacattcacgactttacctcacaaaaaatcaaaaaagtcagaaactttatactgttcacaaaaaaaaacaaaaatttcaaaactttaaattacccacaataaatattggatatac

SEQ ID NO: 1925 - DNA, 200 bp, Conyza canadensis
ggtttcttagacgggtcatgtttgttttgtgtaaaatacatctgtttttttctttgataacaagttatagaagttgcacccaaaaatgttcttgttaaagcgataaaaatttggatagaaggtgacggttaatgattcgatatattgatttgagtttccttttatctattgcattttcacaagttcaacattccaccctc

SEQ ID NO: 1926 - DNA, 200 bp, Conyza canadensis
gagggtggaatgttgaacttgtgaaaatgcaatagataaaaggaaactcaaatcaatatatcgaatcattaaccgtcaccttctatccaaatttttatcgctttaacaagaacatttttgggtgcaacttctataacttgttatcaaagaaaaaaacagatgtattttacacaaaacaaacatgacccgtctaagaaacc

SEQ ID NO: 1927 - DNA, 200 bp, Conyza canadensis
ttcacaagttcaacattccaccctcgattttttgatgaatctatgactgaagaaaagggcgattgttgcctttggcaatcagttttggattttattttgtcatggaaagggggtgttagttcctgaaccttagtagaagatgataagctatagtttcaatattgcttttctttcttgcatctgaactggttttgcatttt

SEQ ID NO: 1928 - DNA, 200 bp, Conyza canadensis
aaaatgcaaaaccagttcagatgcaagaaagaaaagcaatattgaaactatagcttatcatcttctactaaggttcaggaactaacaccccctttccatgacaaaataaaatccaaaactgattgccaaaggcaacaatcgcccttttcttcagtcatagattcatcaaaaaatcgagggtggaatgttgaacttgtgaa

SEQ ID NO: 1929 - DNA, 200 bp, Conyza canadensis
tgcatctgaactggttttgcatttttcaaaggactataaaagatgctatttatcacctatgacctatgttataaatagtaaggtattaaactattaatattggtatagtcttgagaaatccatgaatttcgattgagttcataggacacatctaacttatgtttctttacattacgatttacacatcttgtctttgacgt

SEQ ID NO: 1930 - DNA, 200 bp, Conyza canadensis
acgtcaaagacaagatgtgtaaatcgtaatgtaaagaaacataagttagatgtgtcctatgaactcaatcgaaattcatggatttctcaagactataccaatattaatagtttaataccttactatttataacataggtcataggtgataaatagcatcttttatagtcctttgaaaaatgcaaaaccagttcagatgca

SEQ ID NO: 1931 - DNA, 200 bp, Conyza canadensis
gatttacacatcttgtctttgacgtctgattttaaaatagcgtttctattgacattatgcatttctttgagttctctatataaatttttgtaagctttccatatgtatatactatgaatctgagtgaacttatgctatcaggggactactgttgtagacaacttgttaaacagtgatgatgttcattacatgcttggagc

SEQ ID NO: 1932 - DNA, 200 bp, Conyza canadensis
gctccaagcatgtaatgaacatcatcactgtttaacaagttgtctacaacagtagtcccctgatagcataagttcactcagattcatagtatatacatatggaaagcttacaaaaatttatatagagaactcaaagaaatgcataatgtcaatagaaacgctattttaaaatcagacgtcaaagacaagatgtgtaaatc

SEQ ID NO: 1933 - DNA, 200 bp, Conyza canadensis
atgatgttcattacatgcttggagctttaagagctctagggttaaatgttgaagaaaatagtgcaattaaaagagcaatcgtagaaggttgtggtggtgtatttcccgtgggtaaagaagccaaggatgaaatccagctttttcttggaaatgcaggaacagctatgcgtccattgactgctgccgttactgctgccggt

SEQ ID NO: 1934 - DNA, 200 bp, Conyza canadensis
accggcagcagtaacggcagcagtcaatggacgcatagctgttcctgcatttccaagaaaaagctggatttcatccttggcttctttacccacgggaaatacaccaccacaaccttctacgattgctcttttaattgcactattttcttcaacatttaaccctagagctcttaaagctccaagcatgtaatgaacatcat

SEQ ID NO: 1935 - DNA, 200 bp, Conyza canadensis
gactgctgccgttactgctgccggtggaaactcaaggtattttaacttagtgttatattctcctgcattttatgtctgcttcatcctcctacacatacatttcatgacatgtgtacccatttctctcacctcatcatttcatttttctatgtgtcacaattatatgagtaggaggattcatactttcataggcataaatt

SEQ ID NO: 1936 - DNA, 200 bp, Conyza canadensis
aatttatgcctatgaaagtatgaatcctcctactcatataattgtgacacatagaaaaatgaaatgatgaggtgagagaaatgggtacacatgtcatgaaatgtatgtgtaggaggatgaagcagacataaaatgcaggagaatataacactaagttaaaataccttgagtttccaccggcagcagtaacggcagcagtc

SEQ ID NO: 1937 - DNA, 200 bp, Conyza canadensis
attcatactttcataggcataaattgtaggaatcaaatatcgtttctttttaacctaacatctcttgattagctattataatccgtagaacgtatattaaagttttttgtgccgatatgtaattttaaggtgaatacacaaataaaaattttacctttctgtttgttgcatgttctgtacatataaatttttagtttttg

SEQ ID NO: 1938 - DNA, 200 bp, Conyza canadensis
caaaaactaaaaatttatatgtacagaacatgcaacaaacagaaaggtaaaatttttatttgtgtattcaccttaaaattacatatcggcacaaaaaactttaatatacgttctacggattataatagctaatcaagagatgttaggttaaaaagaaacgatatttgattcctacaatttatgcctatgaaagtatgaat

SEQ ID NO: 1939 - DNA, 200 bp, Conyza canadensis
tgtacatataaatttttagtttttgttatatatctaagaatctaagatctctaaatattcttctattagttgacacaaattaagggatcacatgaactgaaaactcaatagcatccacttgttgataatgctgcaatttaatgcccaaagaagaaattattgcaattcttattatcattttatttatgggagacagtgag

SEQ ID NO: 1940 - DNA, 200 bp, Conyza canadensis
ctcactgtctcccataaataaaatgataataagaattgcaataatttcttctttgggcattaaattgcagcattatcaacaagtggatgctattgagttttcagttcatgtgatcccttaatttgtgtcaactaatagaagaatatttagagatcttagattcttagatatataacaaaaactaaaaatttatatgtaca

SEQ ID NO: 1941 - DNA, 200 bp, Conyza canadensis
cattttatttatgggagacagtgagtatgaatttgggaatcgataatagagttgaccaacttggtggtgctgggtagctaaggtagtgggtaagttacattgatatgtaataccctaacagttatgagttttttcttcagctacatactagatggtgttcctcgaatgagggagaggccaattggtgatctggtcaccgg

SEQ ID NO: 1942 - DNA, 200 bp, Conyza canadensis
ccggtgaccagatcaccaattggcctctccctcattcgaggaacaccatctagtatgtagctgaagaaaaaactcataactgttagggtattacatatcaatgtaacttacccactaccttagctacccagcaccaccaagttggtcaactctattatcgattcccaaattcatactcactgtctcccataaataaaatg

SEQ ID NO: 1943 - DNA, 200 bp, Conyza canadensis
ggccaattggtgatctggtcaccggtctaaaacagcttggtgcaaatgttgattgttctctcggtacaaactgcccaccggttcgtgtagttggaagtggaggccttcctggtggaaaggtaatcaacaataagattgctgcattttaaagtcgtaagaattaattatttggttccatatatgattggaaaatttggtta

SEQ ID NO: 1944 - DNA, 200 bp, Conyza canadensis
taaccaaattttccaatcatatatggaaccaaataattaattcttacgactttaaaatgcagcaatcttattgttgattacctttccaccaggaaggcctccacttccaactacacgaaccggtgggcagtttgtaccgagagaacaatcaacatttgcaccaagctgttttagaccggtgaccagatcaccaattggcc

SEQ ID NO: 1945 - DNA, 200 bp, Conyza canadensis
catatatgattggaaaatttggttatttaagaaactattaattagtaatgaaattatagtttttgaatctttttgtaatcttctttccctggccttcttattgcaggtgaaattgtcaggatctataagtagccaatacttgacttctttgcttatggcggctcctcttgcactgggagacgtagagatagaaattgtag

SEQ ID NO: 1946 - DNA, 200 bp, Conyza canadensis
ctacaatttctatctctacgtctcccagtgcaagaggagccgccataagcaaagaagtcaagtattggctacttatagatcctgacaatttcacctgcaataagaaggccagggaaagaagattacaaaaagattcaaaaactataatttcattactaattaatagtttcttaaataaccaaattttccaatcatatatg

SEQ ID NO: 1947 - DNA, 200 bp, Conyza canadensis
ggagacgtagagatagaaattgtagataaattgatctctgtaccatatgtggagatgacacttaagttgatggagcggtttggggtttcagtagaacacagtgatacttgggacagattccatgtccgaggcggtcaaaagtacaagtaagttgatcatttcataaaagtcaatytttacgtgaagatcggtcaacatct

SEQ ID NO: 1948 - DNA, 200 bp, Conyza canadensis
agatgttgaccgatcttcacgtaaarattgacttttatgaaatgatcaacttacttgtacttttgaccgcctcggacatggaatctgtcccaagtatcactgtgttctactgaaaccccaaaccgctccatcaacttaagtgtcatctccacatatggtacagagatcaatttatctacaatttctatctctacgtctcc

SEQ ID NO: 1949 - DNA, 200 bp, Conyza canadensis
tttacgtgaagatcggtcaacatctattttaatccgataaaatctctttaggtcacctggaaatgcttatgtggaaggtgatgcttcaagtgcgagttacttcttagctggtgctgccatcactggcggaactgtcaccgtggaaggttgcgggacaagcagtttacaggtattatccatgtgcccacctcaaagatatt

SEQ ID NO: 1950 - DNA, 200 bp, Conyza canadensis
aatatctttgaggtgggcacatggataatacctgtaaactgcttgtcccgcaaccttccacggtgacagttccgccagtgatggcagcaccagctaagaagtaactcgcacttgaagcatcaccttccacataagcatttccaggtgacctaaagagattttatcggattaaaatagatgttgaccgatcttcacgtaaa

SEQ ID NO: 1951 - DNA, 200 bp, Conyza canadensis
tccatgtgcccacctcaaagatattcaaaaactaaattgtttctcaagtatatattcttctagttaattgcaaatttttttgccccatacgtctacccattctataaatttcgtccaaagttggtgactcggttcaatcgtgtaataagtctcttttttgttttttagaattgacaatttatgtcagttcttggttatat

SEQ ID NO: 1952 - DNA, 200 bp, Conyza canadensis
atataaccaagaactgacataaattgtcaattctaaaaaacaaaaaagagacttattacacgattgaaccgagtcaccaactttggacgaaatttatagaatgggtagacgtatggggcaaaaaaatttgcaattaactagaagaatatatacttgagaaacaatttagtttttgaatatctttgaggtgggcacatgga

SEQ ID NO: 1953 - DNA, 200 bp, Conyza canadensis
aatttatgtcagttcttggttatatcaacgatgtggggagtgtattgtgcacacattctaaaagaaggacatttagtctttttgctttctttttgcctcaagatcatcttcatcttttcaagatactctgcactcatttgcattatcaaagttttggatgcattctgtaactgtggtacaaggagggagacataatatgt

SEQ ID NO: 1954 - DNA, 200 bp, Conyza canadensis
acatattatgtctccctccttgtaccacagttacagaatgcatccaaaactttgataatgcaaatgagtgcagagtatcttgaaaagatgaagatgatcttgaggcaaaaagaaagcaaaaagactaaatgtccttcttttagaatgtgtgcacaatacactccccacatcgttgatataaccaagaactgacataaatt

SEQ ID NO: 1955 - DNA, 200 bp, Conyza canadensis
gtacaaggagggagacataatatgtcattagttcttattcttaagctcaatgcacactatcacctcttacttcttttttctttctttttttttattagtttatttaagctcaatgcacactaacacttcttctttataacttcaagtcattcattttaatttttgaagctgatggtttttgacattaaagatagaactat

SEQ ID NO: 1956 - DNA, 200 bp, Conyza canadensis
atagttctatctttaatgtcaaaaaccatcagcttcaaaaattaaaatgaatgacttgaagttataaagaagaagtgttagtgtgcattgagcttaaataaactaataaaaaaaaagaaagaaaaaagaagtaagaggtgatagtgtgcattgagcttaagaataagaactaatgacatattatgtctccctccttgtac

SEQ ID NO: 1957 - DNA, 200 bp, Conyza canadensis
tttttgacattaaagatagaactatgtatatacatatgtcatttcatcttacctatttgcatgtcttgttgatctttaatcagggtgatgtaaaatttgctgaggtccttggacaaatgggcgctgaagtaacctggacagagaactctgtcacggtgaagggtccgccaaggaattcttccggaaggggacacttgcgt

SEQ ID NO: 1958 - DNA, 200 bp, Conyza canadensis
acgcaagtgtccccttccggaagaattccttggcggacccttcaccgtgacagagttctctgtccaggttacttcagcgcccatttgtccaaggacctcagcaaattttacatcaccctgattaaagatcaacaagacatgcaaataggtaagatgaaatgacatatgtatatacatagttctatctttaatgtcaaaaa

SEQ ID NO: 1959 - DNA, 200 bp, Conyza canadensis
ttcttccggaaggggacacttgcgtccagtagatgtgaacatgaacaaaatgccggatgttgcgatgactcttgctgtggttgccctttatgctgatggccccactgccattagagacggtatgtgttagaattcaccacagctttgtaatgttaaatatatgttagtttagattaacaaaatgactatatgatcacaaa

SEQ ID NO: 1960 - DNA, 200 bp, Conyza canadensis
tttgtgatcatatagtcattttgttaatctaaactaacatatatttaacattacaaagctgtggtgaattctaacacataccgtctctaatggcagtggggccatcagcataaagggcaaccacagcaagagtcatcgcaacatccggcattttgttcatgttcacatctactggacgcaagtgtccccttccggaagaa

SEQ ID NO: 1961 - DNA, 200 bp, Conyza canadensis
aacaaaatgactatatgatcacaaaaggaaacatttatctcaaatttggaactaatatagtatcatacctatatagcaattgtagtttcaaagaaatccttaaggtcgtgttgtttattatacatgactgggtatatattgttttttgtgctcaagcttttaaaaatcacatttgactatcctttattgaaaggttaatt

SEQ ID NO: 1962 - DNA, 200 bp, Conyza canadensis
aattaacctttcaataaaggatagtcaaatgtgatttttaaaagcttgagcacaaaaaacaatatatacccagtcatgtataataaacaacacgaccttaaggatttctttgaaactacaattgctatataggtatgatactatattagttccaaatttgagataaatgtttccttttgtgatcatatagtcattttgtt

SEQ ID NO: 1963 - DNA, 200 bp, Conyza canadensis
actatcctttattgaaaggttaattttgttcatgtctcattttaggcaatttactttttatcaaggaaaaaatagcaatcaatgtctatggtcgtagtttaggcaattaaaacccatcaatcaaagtgctgttggttcaaggcatatttagagataaatggagataatagtacgtggatgtcttttcaaaagaagtacaa

SEQ ID NO: 1964 - DNA, 200 bp, Conyza canadensis
ttgtacttcttttgaaaagacatccacgtactattatctccatttatctctaaatatgccttgaaccaacagcactttgattgatgggttttaattgcctaaactacgaccatagacattgattgctattttttccttgataaaaagtaaattgcctaaaatgagacatgaacaaaattaacctttcaataaaggatagt

SEQ ID NO: 1965 - DNA, 200 bp, Conyza canadensis
ggatgtcttttcaaaagaagtacaaactttttcttgggctctttagtttttactgaaaataccaaactcctttaactgaattgtctaaaatagaagaaactggaaattagttgctattttgtgaaaacgaaaagtaaatcgccaaaaattggaggttaagtatgcttatattttatgtaattcatctttttgaaaaatgt

SEQ ID NO: 1966 - DNA, 200 bp, Conyza canadensis
acatttttcaaaaagatgaattacataaaatataagcatacttaacctccaatttttggcgatttacttttcgttttcacaaaatagcaactaatttccagtttcttctattttagacaattcagttaaaggagtttggtattttcagtaaaaactaaagagcccaagaaaaagtttgtacttcttttgaaaagacatcc

SEQ ID NO: 1967 - DNA, 200 bp, Conyza canadensis
tgtaattcatctttttgaaaaatgtaagaacttaaatggaagtgaattgatttgaaaaatatatattaaagcaccacttatgaagaaatctagaaattgagttttaggatctgtaaagacatcctgtatattgtatgagaatagatatatcgtacaccacaatccatcatttttacttttcacacgacaaagtgaatatg

SEQ ID NO: 1968 - DNA, 200 bp, Conyza canadensis
catattcactttgtcgtgtgaaaagtaaaaatgatggattgtggtgtacgatatatctattctcatacaatatacaggatgtctttacagatcctaaaactcaatttctagatttcttcataagtggtgctttaatatatatttttcaaatcaattcacttccatttaagttcttacatttttcaaaaagatgaattaca

SEQ ID NO: 1969 - DNA, 200 bp, Conyza canadensis
cttttcacacgacaaagtgaatatgaaaaaatgtgagttaaaacacttaaaaggcagttttgggtgtgcaaagtaaaatgtagcacaaattggcccctttctcatattgggtttacatattcttctttacgtatatccctatattgttcattttgtgggccccatctcacgtcggtaaatcattagatggactaaatcat

SEQ ID NO: 1970 - DNA, 200 bp, Conyza canadensis
atgatttagtccatctaatgatttaccgacgtgagatggggcccacaaaatgaacaatatagggatatacgtaaagaagaatatgtaaacccaatatgagaaaggggccaatttgtgctacattttactttgcacacccaaaactgccttttaagtgttttaactcacattttttcatattcactttgtcgtgtgaaaag

SEQ ID NO: 1971 - DNA, 200 bp, Conyza canadensis
taaatcattagatggactaaatcatattcttcattccttatattgggcagtggctagctggagagtaaaagaaacggaaaggatgattgccatctgcacagaactaagaaaggtacaagtcattaacccatcttactctaaaaaatagaatggccatgagtacttttaaagtactcaatgaatctgcccattatttgttt

SEQ ID NO: 1972 - DNA, 200 bp, Conyza canadensis
aaacaaataatgggcagattcattgagtactttaaaagtactcatggccattctattttttagagtaagatgggttaatgacttgtacctttcttagttctgtgcagatggcaatcatcctttccgtttcttttactctccagctagccactgcccaatataaggaatgaagaatatgatttagtccatctaatgattta

SEQ ID NO: 1973 - DNA, 200 bp, Conyza canadensis
caatgaatctgcccattatttgtttagtgctaataggcccttttgcccttggaacttttcagttgggagcaacagtcgaagaaggtccagattattgtgtgatcactccaccagagaaattgaatgtgacagcaatcgacacatacgatgatcacagaatggccatggctttctcgcttgccgcctgtgcagaggttcct

SEQ ID NO: 1974 - DNA, 200 bp, Conyza canadensis
aggaacctctgcacaggcggcaagcgagaaagccatggccattctgtgatcatcgtatgtgtcgattgctgtcacattcaatttctctggtggagtgatcacacaataatctggaccttcttcgactgttgctcccaactgaaaagttccaagggcaaaagggcctattagcactaaacaaataatgggcagattcattg

SEQ ID NO: 1975 - DNA, 200 bp, Conyza canadensis
gcttgccgcctgtgcagaggttcctgtcaccattaaggacccgggttgcacccgtaagaccttccccgactactttgaagttcttgaaagatacactaagcattaaatcacatataagatgttcagaaagaaaggggttagaggttttaaaatgacacctttacccttcagtccttcaccattatctttcttcagaaatg

SEQ ID NO: 1976 - DNA, 200 bp, Conyza canadensis
catttctgaagaaagataatggtgaaggactgaagggtaaaggtgtcattttaaaacctctaacccctttctttctgaacatcttatatgtgatttaatgcttagtgtatctttcaagaacttcaaagtagtcggggaaggtcttacgggtgcaacccgggtccttaatggtgacaggaacctctgcacaggcggcaagc

SEQ ID NO: 1977 - DNA, 200 bp, Conyza canadensis
tcaacaaaatctttcaccatgtcaaacaacgaaaaccaaagtaacgacctttggaatcactttcaagaaaacccgatgctgagtatgcccctgatgccgcctataccggttatatcatcagctaaccaaggccaaacaagccatgtttcaggctcatccaacccgaccccaatggggagaccagttccgacgggtttgtc

SEQ ID NO: 1978 - DNA, 200 bp, Conyza canadensis
gacaaacccgtcggaactggtctccccattggggtcgggttggatgagcctgaaacatggcttgtttggccttggttagctgatgatataaccggtataggcggcatcaggggcatactcagcatcgggttttcttgaaagtgattccaaaggtcgttactttggttttcgttgtttgacatggtgaaagattttgttga

SEQ ID NO: 1979 - DNA, 200 bp, Conyza canadensis
ggagaccagttccgacgggtttgtcgcaatacgacctagaagcacatatgagttatcgccaacacttgcaacagaactatgcaagctcgttttatgcaccaccggcggcaccggggccacaaccgggtcctagccacgacccggaagaggacgaggatgaccagaccgccgacggcgagtagtttttttaaaatactcgt

SEQ ID NO: 1980 - DNA, 200 bp, Conyza canadensis
acgagtattttaaaaaaactactcgccgtcggcggtctggtcatcctcgtcctcttccgggtcgtggctaggacccggttgtggccccggtgccgccggtggtgcataaaacgagcttgcatagttctgttgcaagtgttggcgataactcatatgtgcttctaggtcgtattgcgacaaacccgtcggaactggtctcc

SEQ ID NO: 1981 - DNA, 200 bp, Conyza canadensis
cgagtagtttttttaaaatactcgtaatgttttatttttctttgcaatgttttatttttaagtgtgttatgtgttttatttttagtggtaatgtttaattgtaatttttttttaatttagttgtaatggttaatttttaataaaattaagtagttttttaagtttgtgtgtaaataaatataaaataaaataaaaaaaat

SEQ ID NO: 1982 - DNA, 200 bp, Conyza canadensis
attttttttattttattttatatttatttacacacaaacttaaaaaactacttaattttattaaaaattaaccattacaactaaattaaaaaaaaattacaattaaacattaccactaaaaataaaacacataacacacttaaaaataaaacattgcaaagaaaaataaaacattacgagtattttaaaaaaactactcg

SEQ ID NO: 1983 - DNA, 200 bp, Conyza canadensis
aaatataaaataaaataaaaaaaataaaaagtgtggaagaggggttatagggagtgattgtggaagaggtggatgaagaaagagaaaagctgacgtgacagtgtggaagagggtaaggatgaggtgctatagggagaggtcttattgagttataatgatgtcaatggcttaataacttaatgacattttggtgatgcgta

SEQ ID NO: 1984 - DNA, 200 bp, Conyza canadensis
tacgcatcaccaaaatgtcattaagttattaagccattgacatcattataactcaataagacctctccctatagcacctcatccttaccctcttccacactgtcacgtcagcttttctctttcttcatccacctcttccacaatcactccctataacccctcttccacactttttattttttttattttattttatattt

SEQ ID NO: 1985 - DNA, 200 bp, Conyza canadensis
cttaatgacattttggtgatgcgtaagaccttaagaccagaaagtctaagtttgaatcttataaaataggtttttttctattttccaaatttattgagttttctcatgagttcatgtatgagcattattgcatagtgaaaatatggtcagatggtttcatcgatgacaagctaatttttaagaaagatatattacttttc

SEQ ID NO: 1986 - DNA, 200 bp, Conyza canadensis
gaaaagtaatatatctttcttaaaaattagcttgtcatcgatgaaaccatctgaccatattttcactatgcaataatgctcatacatgaactcatgagaaaactcaataaatttggaaaatagaaaaaaacctattttataagattcaaacttagactttctggtcttaaggtcttacgcatcaccaaaatgtcattaag

SEQ ID NO: 1987 - DNA, 200 bp, Conyza canadensis
ttttaagaaagatatattacttttctttttaacttgggaaaatcataaaagtgaaatcatcgttttaactttttacgagcatggtactcgcgtaatgcagcggcggtggtatagaagacggtctaatggtggcagtgtcaagtggtgtaggtctatgtgcaccgaaactccaaactgacatagccgtacccatttccgaa

SEQ ID NO: 1988 - DNA, 200 bp, Conyza canadensis
ttcggaaatgggtacggctatgtcagtttggagtttcggtgcacatagacctacaccacttgacactgccaccattagaccgtcttctataccaccgccgctgcattacgcgagtaccatgctcgtaaaaagttaaaacgatgatttcacttttatgattttcccaagttaaaaagaaaagtaatatatctttcttaaaa

SEQ ID NO: 1989 - DNA, 200 bp, Conyza canadensis
tgacatagccgtacccatttccgaaactccatggaaacgttttctcttacgaaacacgtatgaaacattccctaaaattttctatagattaaacgtttctttgaagtttccatacggtttctaattaatatcaaggttttaaaggactttttcgaatccccaaacccaaacatgttatattatatacaatttgatcaaca

SEQ ID NO: 1990 - DNA, 200 bp, Conyza canadensis
tgttgatcaaattgtatataatataacatgtttgggtttggggattcgaaaaagtcctttaaaaccttgatattaattagaaaccgtatggaaacttcaaagaaacgtttaatctatagaaaattttagggaatgtttcatacgtgtttcgtaagagaaaacgtttccatggagtttcggaaatgggtacggctatgtca

SEQ ID NO: 1991 - DNA, 200 bp, Conyza canadensis
tatattatatacaatttgatcaacattaaattttttatattacaaagccattattaaacactaaacattcaatgagtgatcactaatcaaacatgtattataaagttctacatatataattatacataatctctcaagtctcaaatctcctttatgaaaaaattgatataatttatatttgtatattttttttattgttg

SEQ ID NO: 1992 - DNA, 200 bp, Conyza canadensis
caacaataaaaaaaatatacaaatataaattatatcaattttttcataaaggagatttgagacttgagagattatgtataattatatatgtagaactttataatacatgtttgattagtgatcactcattgaatgtttagtgtttaataatggctttgtaatataaaaaatttaatgttgatcaaattgtatataatata

SEQ ID NO: 1993 - DNA, 200 bp, Conyza canadensis
tatttgtatattttttttattgttgtacccgtatcctggattttttagttttactgttccccgttcccgtattgttcccgtacccttttcccgtacctgtttcggtgctacataggtgtaggttgatgtaattgtgatagtgaaaagttttagaagataagagtttaaagtgttaagtattaaaataagggtttatggtg

SEQ ID NO: 1994 - DNA, 200 bp, Conyza canadensis
caccataaacccttattttaatacttaacactttaaactcttatcttctaaaacttttcactatcacaattacatcaacctacacctatgtagcaccgaaacaggtacgggaaaagggtacgggaacaatacgggaacggggaacagtaaaactaaaaaatccaggatacgggtacaacaataaaaaaaatatacaaata

SEQ ID NO: 1995 - DNA, 200 bp, Conyza canadensis
agtattaaaataagggtttatggtgtaaattaattcattaaggggaaaatttataaaactatttctatagtgggtttttattaagagacaatttagtaattttatatgtgacatatgagtaactatttttattttgagaggggtgcataatttttattcgaagagtacggataaaagtcaataaattacgagcagtgaag

SEQ ID NO: 1996 - DNA, 200 bp, Conyza canadensis
cttcactgctcgtaatttattgacttttatccgtactcttcgaataaaaattatgcacccctctcaaaataaaaatagttactcatatgtcacatataaaattactaaattgtctcttaataaaaacccactatagaaatagttttataaattttccccttaatgaattaatttacaccataaacccttattttaatact

SEQ ID NO: 1997 - DNA, 200 bp, Conyza canadensis; identical to SEQ ID NO: 1287

SEQ ID NO: 1998 - DNA, 200 bp, Conyza canadensis; identical to SEQ ID NO: 1288

SEQ ID NO: 1999 - DNA, 200 bp, Conyza canadensis; identical to SEQ ID NO: 1289

SEQ ID NO: 2000 - DNA, 200 bp, Conyza canadensis; identical to SEQ ID NO: 1290

SEQ ID NO: 2001 - DNA, 200 bp, Conyza canadensis; identical to SEQ ID NO: 1291

SEQ ID NO: 2002 - DNA, 200 bp, Conyza canadensis; identical to SEQ ID NO: 1292

SEQ ID NO: 2003 - DNA, 200 bp, Conyza canadensis; identical to SEQ ID NO: 1293

SEQ ID NO: 2004 - DNA, 200 bp, Conyza canadensis; identical to SEQ ID NO: 1294

SEQ ID NO: 2005 - DNA, 200 bp, Conyza canadensis; identical to SEQ ID NO: 1295

SEQ ID NO: 2006 - DNA, 200 bp, Conyza canadensis; identical to SEQ ID NO: 1296

SEQ ID NO: 2007 - DNA, 200 bp, Conyza canadensis; identical to SEQ ID NO: 1297

SEQ ID NO: 2008 - DNA, 200 bp, Conyza canadensis; identical to SEQ ID NO: 1298

SEQ ID NO: 2009 - DNA, 200 bp, Conyza canadensis; identical to SEQ ID NO: 1299

SEQ ID NO: 2010 - DNA, 200 bp, Conyza canadensis; identical to SEQ ID NO: 1300

SEQ ID NO: 2011 - DNA, 200 bp, Conyza canadensis; identical to SEQ ID NO: 1301

SEQ ID NO: 2012 - DNA, 200 bp, Conyza canadensis; identical to SEQ ID NO: 1302

SEQ ID NO: 2013 - DNA, 200 bp, Conyza canadensis; identical to SEQ ID NO: 1303

SEQ ID NO: 2014 - DNA, 200 bp, Conyza canadensis; identical to SEQ ID NO: 1304

SEQ ID NO: 2015 - DNA, 200 bp, Conyza canadensis; identical to SEQ ID NO: 1305

SEQ ID NO: 2016 - DNA, 200 bp, Conyza canadensis; identical to SEQ ID NO: 1306

SEQ ID NO: 2017 - DNA, 200 bp, Conyza canadensis; identical to SEQ ID NO: 1307

SEQ ID NO: 2018 - DNA, 200 bp, Conyza canadensis; identical to SEQ ID NO: 1308

SEQ ID NO: 2019 - DNA, 200 bp, Conyza canadensis; identical to SEQ ID NO: 1309

SEQ ID NO: 2020 - DNA, 200 bp, Conyza canadensis; identical to SEQ ID NO: 1310

SEQ ID NO: 2021 - DNA, 200 bp, Conyza canadensis; identical to SEQ ID NO: 1311

SEQ ID NO: 2022 - DNA, 200 bp, Conyza canadensis; identical to SEQ ID NO: 1312

SEQ ID NO: 2023 - DNA, 200 bp, Conyza canadensis; identical to SEQ ID NO: 1313

SEQ ID NO: 2024 - DNA, 200 bp, Conyza canadensis; identical to SEQ ID NO: 1314

SEQ ID NO: 2025 - DNA, 200 bp, Conyza canadensis; identical to SEQ ID NO: 1315

SEQ ID NO: 2026 - DNA, 200 bp, Conyza canadensis; identical to SEQ ID NO: 1316

SEQ ID NO: 2027 - DNA, 200 bp, Conyza canadensis; identical to SEQ ID NO: 1317

SEQ ID NO: 2028 - DNA, 200 bp, Conyza canadensis; identical to SEQ ID NO: 1318

SEQ ID NO: 2029 - DNA, 200 bp, Conyza canadensis; identical to SEQ ID NO: 1319

SEQ ID NO: 2030 - DNA, 200 bp, Conyza canadensis; identical to SEQ ID NO: 1320

SEQ ID NO: 2031 - DNA, 200 bp, Conyza canadensis; identical to SEQ ID NO: 1321

SEQ ID NO: 2032 - DNA, 200 bp, Conyza canadensis; identical to SEQ ID NO: 1322

SEQ ID NO: 2033 - DNA, 200 bp, Conyza canadensis; identical to SEQ ID NO: 1323

SEQ ID NO: 2034 - DNA, 200 bp, Conyza canadensis; identical to SEQ ID NO: 1324

SEQ ID NO: 2035 - DNA, 200 bp, Conyza canadensis; identical to SEQ ID NO: 1325

SEQ ID NO: 2036 - DNA, 200 bp, Conyza canadensis; identical to SEQ ID NO: 1326

SEQ ID NO: 2037 - DNA, 200 bp, Conyza canadensis; identical to SEQ ID NO: 1327

SEQ ID NO: 2038 - DNA, 200 bp, Conyza canadensis; identical to SEQ ID NO: 1328

SEQ ID NO: 2039 - DNA, 200 bp, Conyza canadensis; identical to SEQ ID NO: 1329

SEQ ID NO: 2040 - DNA, 200 bp, Conyza canadensis; identical to SEQ ID NO: 1330

SEQ ID NO: 2041 - DNA, 200 bp, Conyza canadensis; identical to SEQ ID NO: 1331

SEQ ID NO: 2042 - DNA, 200 bp, Conyza canadensis; identical to SEQ ID NO: 1332

SEQ ID NO: 2043 - DNA, 200 bp, Conyza canadensis; identical to SEQ ID NO: 1333

SEQ ID NO: 2044 - DNA, 200 bp, Conyza canadensis; identical to SEQ ID NO: 1334

SEQ ID NO: 2045 - DNA, 200 bp, Conyza canadensis; identical to SEQ ID NO: 1335

SEQ ID NO: 2046 - DNA, 200 bp, Conyza canadensis; identical to SEQ ID NO: 1336

SEQ ID NO: 2047 - DNA, 200 bp, Conyza canadensis; identical to SEQ ID NO: 1337

SEQ ID NO: 2048 - DNA, 200 bp, Conyza canadensis; identical to SEQ ID NO: 1338

SEQ ID NO: 2049 - DNA, 200 bp, Conyza canadensis; identical to SEQ ID NO: 1339

SEQ ID NO: 2050 - DNA, 200 bp, Conyza canadensis; identical to SEQ ID NO: 1340

SEQ ID NO: 2051 - DNA, 200 bp, Conyza canadensis; identical to SEQ ID NO: 1341

SEQ ID NO: 2052 - DNA, 200 bp, Conyza canadensis; identical to SEQ ID NO: 1342

SEQ ID NO: 2053 - DNA, 200 bp, Conyza canadensis; identical to SEQ ID NO: 1343

SEQ ID NO: 2054 - DNA, 200 bp, Conyza canadensis; identical to SEQ ID NO: 1344

SEQ ID NO: 2055 - DNA, 200 bp, Conyza canadensis; identical to SEQ ID NO: 1345

SEQ ID NO: 2056 - DNA, 200 bp, Conyza canadensis; identical to SEQ ID NO: 1346

SEQ ID NO: 2057 - DNA, 200 bp, Conyza canadensis; identical to SEQ ID NO: 1347

SEQ ID NO: 2058 - DNA, 200 bp, Conyza canadensis; identical to SEQ ID NO: 1348

SEQ ID NO: 2059 - DNA, 200 bp, Conyza canadensis; identical to SEQ ID NO: 1349

SEQ ID NO: 2060 - DNA, 200 bp, Conyza canadensis; identical to SEQ ID NO: 1350

SEQ ID NO: 2061 - DNA, 200 bp, Conyza canadensis; identical to SEQ ID NO: 1351

SEQ ID NO: 2062 - DNA, 200 bp, Conyza canadensis; identical to SEQ ID NO: 1352

SEQ ID NO: 2063 - DNA, 200 bp, Conyza canadensis; identical to SEQ ID NO: 1353

SEQ ID NO: 2064 - DNA, 200 bp, Conyza canadensis; identical to SEQ ID NO: 1354

SEQ ID NO: 2065 - DNA, 200 bp, Conyza canadensis; identical to SEQ ID NO: 1355

SEQ ID NO: 2066 - DNA, 200 bp, Conyza canadensis; identical to SEQ ID NO: 1356

SEQ ID NO: 2067 - DNA, 200 bp, Conyza canadensis; identical to SEQ ID NO: 1357

SEQ ID NO: 2068 - DNA, 200 bp, Conyza canadensis; identical to SEQ ID NO: 1358

SEQ ID NO: 2069 - DNA, 200 bp, Conyza canadensis; identical to SEQ ID NO: 1359

SEQ ID NO: 2070 - DNA, 200 bp, Conyza canadensis; identical to SEQ ID NO: 1360

SEQ ID NO: 2071 - DNA, 200 bp, Conyza canadensis; identical to SEQ ID NO: 1361

SEQ ID NO: 2072 - DNA, 200 bp, Conyza canadensis; identical to SEQ ID NO: 1362

SEQ ID NO: 2073 - DNA, 200 bp, Conyza canadensis; identical to SEQ ID NO: 1363

SEQ ID NO: 2074 - DNA, 200 bp, Conyza canadensis; identical to SEQ ID NO: 1364

SEQ ID NO: 2075 - DNA, 200 bp, Conyza canadensis; identical to SEQ ID NO: 1365

SEQ ID NO: 2076 - DNA, 200 bp, Conyza canadensis; identical to SEQ ID NO: 1366

SEQ ID NO: 2077 - DNA, 200 bp, Conyza canadensis; identical to SEQ ID NO: 1367

SEQ ID NO: 2078 - DNA, 200 bp, Conyza canadensis; identical to SEQ ID NO: 1368

SEQ ID NO: 2079 - DNA, 200 bp, Conyza canadensis; identical to SEQ ID NO: 1369

SEQ ID NO: 2080 - DNA, 200 bp, Conyza canadensis; identical to SEQ ID NO: 1370

SEQ ID NO: 2081 - DNA, 200 bp, Conyza canadensis
ctttatctattgatttatccattgttactacaataataagctcttaatcgtataaagcatggttccgttatcacctatttaggcttttcattcttttttaaaaataaaatccaagtatactttaaaattaaaaaaaaaataattagaatttagcaaaattggactgggggcagttgcccccattgcccgcatactaaatc

SEQ ID NO: 2082 - DNA, 200 bp, Conyza canadensis
gatttagtatgcgggcaatgggggcaactgcccccagtccaattttgctaaattctaattattttttttttaattttaaagtatacttggattttatttttaaaaaagaatgaaaagcctaaataggtgataacggaaccatgctttatacgattaagagcttattattgtagtaacaatggataaatcaatagataaag

SEQ ID NO: 2083 - DNA, 200 bp, Conyza canadensis
gcccccattgcccgcatactaaatccgtccctgtatgagaggtaaaacatatttttcttgttattgcatatatatactacaaaaaaaaattcatttgtccacatttggttatcgaaattgtgaaaaaatttatgaatttaatcacatttaaaagtgtgtaaaaataatttacataaaatcacaatacttatacacttata

SEQ ID NO: 2084 - DNA, 200 bp, Conyza canadensis
tataagtgtataagtattgtgattttatgtaaattatttttacacacttttaaatgtgattaaattcataaattttttcacaatttcgataaccaaatgtggacaaatgaatttttttttgtagtatatatatgcaataacaagaaaaatatgttttacctctcatacagggacggatttagtatgcgggcaatgggggc

SEQ ID NO: 2085 - DNA, 200 bp, Conyza canadensis
aaatcacaatacttatacacttataaatgtgtaaacaaaatattaacacttaaaagtgtgaacaattgttaaatattttcatacttaaaagtgtgaaagtcaatttgtgacacatgatttcttcacaccctacgtgtataaagaaaataagtgttacaaattaactttcacactttaagtgtgaatacctctatattttt

SEQ ID NO: 2086 - DNA, 200 bp, Conyza canadensis
aaaaatatagaggtattcacacttaaagtgtgaaagttaatttgtaacacttattttctttatacacgtagggtgtgaagaaatcatgtgtcacaaattgactttcacacttttaagtatgaaaatatttaacaattgttcacacttttaagtgttaatattttgtttacacatttataagtgtataagtattgtgattt

SEQ ID NO: 2087 - DNA, 200 bp, Conyza canadensis
taagtgtgaatacctctatatttttacacacttaaaactatgaacttttctttttcacatgtataagtgtgtaaatattgtgattttttaaatttcttcacactttgaaatgtaaattatacacatttttaaatgtgattaaattaacaaaaatttttacaccttttaaaagtataaaaaaacaagtgtgaggaaatgat

SEQ ID NO: 2088 - DNA, 200 bp, Conyza canadensis
atcatttcctcacacttgtttttttatacttttaaaaggtgtaaaaatttttgttaatttaatcacatttaaaaatgtgtataatttacatttcaaagtgtgaagaaatttaaaaaatcacaatatttacacacttatacatgtgaaaaagaaaagttcatagttttaagtgtgtaaaaatatagaggtattcacactta

SEQ ID NO: 2089 - DNA, 200 bp, Conyza canadensis
aaaaaaacaagtgtgaggaaatgatatatttgttgtagtgataaaacaatgtaaatatcaatgatattatatcatatcacgaacatgacatgaaaaagataaattatcatattcttaatcggaattataaaaaaaaaaaaaacaaaaaacaaaaactatttctcccttacgcaattttattataaaattcttgcaaatac

SEQ ID NO: 2090 - DNA, 200 bp, Conyza canadensis
gtatttgcaagaattttataataaaattgcgtaagggagaaatagtttttgttttttgttttttttttttttataattccgattaagaatatgataatttatctttttcatgtcatgttcgtgatatgatataatatcattgatatttacattgttttatcactacaacaaatatatcatttcctcacacttgttttttt

SEQ ID NO: 2091 - DNA, 200 bp, Conyza canadensis
tttattataaaattcttgcaaatacattaaactataaaaatattgatgaagagtcaagtgaccagtcccttacaatttaattaataatattaaaatcactaaatccctagtttttaaatgatgccttttcatttgtagtcacgttgtttgtaaaggtaatactttattaaaccttaagttagcaaaaaataattaaaacc

SEQ ID NO: 2092 - DNA, 200 bp, Conyza canadensis
ggttttaattattttttgctaacttaaggtttaataaagtattacctttacaaacaacgtgactacaaatgaaaaggcatcatttaaaaactagggatttagtgattttaatattattaattaaattgtaagggactggtcacttgactcttcatcaatatttttatagtttaatgtatttgcaagaattttataataaa

SEQ ID NO: 2093 - DNA, 200 bp, Conyza canadensis
aagttagcaaaaaataattaaaaccattcttgttatcatgtcattttcttaattattcaaaatataagcagtgatatagaattgttagattaattttgctattttaataataggaagaaatgtgtggtataaaattgtttttttctttttgtctttttaaaagtgttctaaattaattttttcatatatgtatatatata

SEQ ID NO: 2094 - DNA, 200 bp, Conyza canadensis
tatatatatacatatatgaaaaaattaatttagaacacttttaaaaagacaaaaagaaaaaaacaattttataccacacatttcttcctattattaaaatagcaaaattaatctaacaattctatatcactgcttatattttgaataattaagaaaatgacatgataacaagaatggttttaattattttttgctaactt

SEQ ID NO: 2095 - DNA, 200 bp, Conyza canadensis
attttttcatatatgtatatatatacaatattatttacaacaaatatacttattttattacataatatatataattatatataacatatacttttgtaaatgattataaattattgtaaatttattactccttagaatagaattattaagtgaaaaaatgcgacatatcatgtgagagttggatgccacatttagtgtca

SEQ ID NO: 2096 - DNA, 200 bp, Conyza canadensis
tgacactaaatgtggcatccaactctcacatgatatgtcgcattttttcacttaataattctattctaaggagtaataaatttacaataatttataatcatttacaaaagtatatgttatatataattatatatattatgtaataaaataagtatatttgttgtaaataatattgtatatatatacatatatgaaaaaat

SEQ ID NO: 2097 - DNA, 200 bp, Conyza canadensis
gagttggatgccacatttagtgtcaagttcacatgatcctcgagttttgtccaaccttctttacagataattccacagctacgccttttagatacgcatacaagagttttgtccaaccttttgtgaacaatttttcccccccttttaaacggtaaatacatttttataacataatgttaatggaacttaaactcgtaaat

SEQ ID NO: 2098 - DNA, 200 bp, Conyza canadensis
atttacgagtttaagttccattaacattatgttataaaaatgtatttaccgtttaaaagggggggaaaaattgttcacaaaaggttggacaaaactcttgtatgcgtatctaaaaggcgtagctgtggaattatctgtaaagaaggttggacaaaactcgaggatcatgtgaacttgacactaaatgtggcatccaactc

SEQ ID NO: 2099 - DNA, 200 bp, Conyza canadensis
gttaatggaacttaaactcgtaaatttttggtatgtaccacatcaaatattattagattataaatgtcatttagtttgcgataatatatttttggtaacgatcattcaaaataattgatagaaacaaaaataaaataaaataaaatattgtgtttgctattcgtgaaaagaaatccgtggttcattataaggtaaacaat

SEQ ID NO: 2100 - DNA, 200 bp, Conyza canadensis
attgtttaccttataatgaaccacggatttcttttcacgaatagcaaacacaatattttattttattttatttttgtttctatcaattattttgaatgatcgttaccaaaaatatattatcgcaaactaaatgacatttataatctaataatatttgatgtggtacataccaaaaatttacgagtttaagttccattaac

SEQ ID NO: 2101 - DNA, 200 bp, Conyza canadensis
cgtggttcattataaggtaaacaattatatgtgacttgacatatgctatacttcttaaatgacttggatgtattttgttattagatgagttatacttatacacttatatgccttgataatgccttgatattcataacacgcaacaagttactgcttataatttgtgaactacaaatttgactctccaactctccatagtg

SEQ ID NO: 2102 - DNA, 200 bp, Conyza canadensis
cactatggagagttggagagtcaaatttgtagttcacaaattataagcagtaacttgttgcgtgttatgaatatcaaggcattatcaaggcatataagtgtataagtataactcatctaataacaaaatacatccaagtcatttaagaagtatagcatatgtcaagtcacatataattgtttaccttataatgaaccacg

SEQ ID NO: 2103 - DNA, 200 bp, Conyza canadensis
tttgactctccaactctccatagtgatttaagaaattgattgatgatgaatatactttaaaattttacctattcatatagttataagaaaaaaagagtaagtgttatttattttgaacacaattttttttttaatacataaaatagtcaaatcgattattttcaagtgtgatatatgtgcatgttatctgattgacgtat

SEQ ID NO: 2104 - DNA, 200 bp, Conyza canadensis
atacgtcaatcagataacatgcacatatatcacacttgaaaataatcgatttgactattttatgtattaaaaaaaaaattgtgttcaaaataaataacacttactctttttttcttataactatatgaataggtaaaattttaaagtatattcatcatcaatcaatttcttaaatcactatggagagttggagagtcaaa

SEQ ID NO: 2105 - DNA, 200 bp, Conyza canadensis
tgtgcatgttatctgattgacgtatcaatgctagctaattaaacattaaattaaatatataaacttataaaggacttaggattgtacttgcataatatatatagttttaaaatgattcttctgatagttttatcatgtccaattgattttgttagttgttaaataataacaataatgataataataaaataaataaaata

SEQ ID NO: 2106 - DNA, 200 bp, Conyza canadensis
tattttatttattttattattatcattattgttattatttaacaactaacaaaatcaattggacatgataaaactatcagaagaatcattttaaaactatatatattatgcaagtacaatcctaagtcctttataagtttatatatttaatttaatgtttaattagctagcattgatacgtcaatcagataacatgcaca

SEQ ID NO: 2107 - DNA, 200 bp, Conyza canadensis
aaactaaattttgatatgattaaaaaaaaaaaaaatgttttagtatgttaggctcaactctcacgtgacatcaaagtcatcaataacttaagtttattttactgtacgaagtccctgcagattgttaaaggtgatcttaaattaaaagcgtaaaagatcaagtcttccatataataaccaatcacaccctaattttttta

SEQ ID NO: 2108 - DNA, 200 bp, Conyza canadensis
taaaaaaattagggtgtgattggttattatatggaagacttgatcttttacgcttttaatttaagatcacctttaacaatctgcagggacttcgtacagtaaaataaacttaagttattgatgactttgatgtcacgtgagagttgagcctaacatactaaaacattttttttttttttaatcatatcaaaatttagttt

SEQ ID NO: 2109 - DNA, 200 bp, Conyza canadensis
aaccaatcacaccctaatttttttaccccaaaatcctaataaaattcatgaagatcttgaatattctttcccttttacacctcccccgtttgactttctttaaatgtatacttgagcttgattaatagtccaccctaataaaatctcaccattttcacaccacaattttatttcaaatcttctttcaaactttcactctc

SEQ ID NO: 2110 - DNA, 200 bp, Conyza canadensis
gagagtgaaagtttgaaagaagatttgaaataaaattgtggtgtgaaaatggtgagattttattagggtggactattaatcaagctcaagtatacatttaaagaaagtcaaacgggggaggtgtaaaagggaaagaatattcaagatcttcatgaattttattaggattttggggtaaaaaaattagggtgtgattggtt

SEQ ID NO: 2111 - DNA, 200 bp, Conyza canadensis
aatcttctttcaaactttcactctctgttcttcaccattctctctccaatcaacttttttctgcaaaccacaatcactcccctgttcaagaaacctcaagattccgccattatcaaaaagttttgttctttcttatcttgtttttacattccttacgccaagattcaaaacccacaaacctttcataaaacccaagtcac

SEQ ID NO: 2112 - DNA, 200 bp, Conyza canadensis
gtgacttgggttttatgaaaggtttgtgggttttgaatcttggcgtaaggaatgtaaaaacaagataagaaagaacaaaactttttgataatggcggaatcttgaggtttcttgaacaggggagtgattgtggtttgcagaaaaaagttgattggagagagaatggtgaagaacagagagtgaaagtttgaaagaagatt

SEQ ID NO: 2113 - DNA, 200 bp, Conyza canadensis
aaacctttcataaaacccaagtcacgtatcaagaatttagcacataaagttggcttcttttttcatcttcaagattacatctttttattcaagatttttgaacaagaatgaagctaatggatgaagatgaaaccccatcaactcctggtaaattcaaaatagataataataaatccatatacattcatcatagattcaga

SEQ ID NO: 2114 - DNA, 200 bp, Conyza canadensis
tctgaatctatgatgaatgtatatggatttattattatctattttgaatttaccaggagttgatggggtttcatcttcatccattagcttcattcttgttcaaaaatcttgaataaaaagatgtaatcttgaagatgaaaaaagaagccaactttatgtgctaaattcttgatacgtgacttgggttttatgaaaggttt

SEQ ID NO: 2115 - DNA, 200 bp, Conyza canadensis
catatacattcatcatagattcagatttctacattacaaatctttagccaaacttacattctggtcctttgttttcttgggcttaatcttggtttttttcttcaattcccaatcatcatcatcacaaattgtagatctttctagaagatctttaaaaacaagtacatggggtggacccatatgggaaaaacgggtcaaat

SEQ ID NO: 2116 - DNA, 200 bp, Conyza canadensis
atttgacccgtttttcccatatgggtccaccccatgtacttgtttttaaagatcttctagaaagatctacaatttgtgatgatgatgattgggaattgaagaaaaaaaccaagattaagcccaagaaaacaaaggaccagaatgtaagtttggctaaagatttgtaatgtagaaatctgaatctatgatgaatgtatatg

SEQ ID NO: 2117 - DNA, 200 bp, Conyza canadensis
cccatatgggaaaaacgggtcaaatcatcagcccggatccgaacccgtaatgggatatccgtattagtcacaggtgcagccgggtttgtagggacacatgtcagtatggccttaaaacggcgtggtgatggtgttttaggtcttgataattttaatgactattatgatccgtcgctaaaaagagctagacagtctttgtt

SEQ ID NO: 2118 - DNA, 200 bp, Conyza canadensis
aacaaagactgtctagctctttttagcgacggatcataatagtcattaaaattatcaagacctaaaacaccatcaccacgccgttttaaggccatactgacatgtgtccctacaaacccggctgcacctgtgactaatacggatatcccattacgggttcggatccgggctgatgatttgacccgtttttcccatatggg

SEQ ID NO: 2119 - DNA, 200 bp, Conyza canadensis
taaaaagagctagacagtctttgttagataaaagtgggatttatatagttgaaggtgacttaaacgatgtcgttttgttaaaaaagttgtttgaattagtcccatttagtcatgttatgcatttggctgcacaagctggtgttagatatgctatgcaaaaccctagttcttatattcatagtaatattgctggttttgtt

SEQ ID NO: 2120 - DNA, 200 bp, Conyza canadensis
aacaaaaccagcaatattactatgaatataagaactagggttttgcatagcatatctaacaccagcttgtgcagccaaatgcataacatgactaaatgggactaattcaaacaacttttttaacaaaacgacatcgtttaagtcaccttcaactatataaatcccacttttatctaacaaagactgtctagctcttttta

SEQ ID NO: 2121 - DNA, 200 bp, Conyza canadensis
tcatagtaatattgctggttttgttaatctgttagaaatttgtaaaaatgctgaccctcaacctgctattgtttgggcttcatctagttcggtttacgggttaaatacgaaagtacccttttcagaaaaggaccggacggatcagcccgcgagtctttatgctgccacgaaaaaggcaggggaagaaatcgcgcatactt

SEQ ID NO: 2122 - DNA, 200 bp, Conyza canadensis
aagtatgcgcgatttcttcccctgcctttttcgtggcagcataaagactcgcgggctgatccgtccggtccttttctgaaaagggtactttcgtatttaacccgtaaaccgaactagatgaagcccaaacaatagcaggttgagggtcagcatttttacaaatttctaacagattaacaaaaccagcaatattactatga

SEQ ID NO: 2123 - DNA, 200 bp, Conyza canadensis
gcaggggaagaaatcgcgcatacttataatcatatatacgggctgtcattgacagggttgcgtttttttactgtttacgggccgtggggtaggccggatatggcgtatttcttttttacccgagacattttgaaagggaaaccgatacctatatttgaaggcccaaatcatggaacagtggctagagattttacgtatat

SEQ ID NO: 2124 - DNA, 200 bp, Conyza canadensis
atatacgtaaaatctctagccactgttccatgatttgggccttcaaatataggtatcggtttccctttcaaaatgtctcgggtaaaaaagaaatacgccatatccggcctaccccacggcccgtaaacagtaaaaaaacgcaaccctgtcaatgacagcccgtatatatgattataagtatgcgcgatttcttcccctgc

SEQ ID NO: 2125 - DNA, 200 bp, Conyza canadensis
cagtggctagagattttacgtatattgatgatatcgtaaaggggtgtttaggggcgttagatactgcagaaaagagtactgggagcggtgggaaaaagcgcgggccagcccagttacgggtttttaatttgggcaatacgtcgcctgtgcctgtttccgagctagttgggatattggaaaggttgttgaaggttaaggcg

SEQ ID NO: 2126 - DNA, 200 bp, Conyza canadensis
cgccttaaccttcaacaacctttccaatatcccaactagctcggaaacaggcacaggcgacgtattgcccaaattaaaaacccgtaactgggctggcccgcgctttttcccaccgctcccagtactcttttctgcagtatctaacgcccctaaacacccctttacgatatcatcaatatacgtaaaatctctagccactg

SEQ ID NO: 2127 - DNA, 200 bp, Conyza canadensis
ggaaaggttgttgaaggttaaggcgaaacgaatggtgatgaaaatgccacgaaatggggatgtgcagtttacgcatgcgaatattagttttgcgaagagggagtttgggtataagccgacaacggatcttcaaagcgggttgaagaaatttgtgagatggtatgttagttactatggaacaggaaagaagactgatcact

SEQ ID NO: 2128 - DNA, 200 bp, Conyza canadensis
agtgatcagtcttctttcctgttccatagtaactaacataccatctcacaaatttcttcaacccgctttgaagatccgttgtcggcttatacccaaactccctcttcgcaaaactaatattcgcatgcgtaaactgcacatccccatttcgtggcattttcatcaccattcgtttcgccttaaccttcaacaacctttcc

SEQ ID NO: 2129 - DNA, 200 bp, Conyza canadensis
ggaacaggaaagaagactgatcactgatatgattaaaaaagatggaaatttgttacctaaaaaagactaaatttttttgtgttataattcttgttgatttggattctcatattgattgtttttcatgatatgatgatggtaattgtttgatacaaactatattgagactacaaaaggaatatattgttttagttcattat

SEQ ID NO: 2130 - DNA, 200 bp, Conyza canadensis
ataatgaactaaaacaatatattccttttgtagtctcaatatagtttgtatcaaacaattaccatcatcatatcatgaaaaacaatcaatatgagaatccaaatcaacaagaattataacacaaaaaaatttagtcttttttaggtaacaaatttccatcttttttaatcatatcagtgatcagtcttctttcctgttcc

SEQ ID NO: 2131 - DNA, 200 bp, Conyza canadensis
ggaatatattgttttagttcattatttttgtgtgatgtgtactaataagtaagatttcacatatgtttttgtaggcttattgttttgtggatttcacgaaagttgagtataattcgttagatttctgatctttctgaactcgaatctggcaacattaatcacacgatcaaccacgcctgcttggatacaagcaccataca

SEQ ID NO: 2132 - DNA, 200 bp, Conyza canadensis
tgtatggtgcttgtatccaagcaggcgtggttgatcgtgtgattaatgttgccagattcgagttcagaaagatcagaaatctaacgaattatactcaactttcgtgaaatccacaaaacaataagcctacaaaaacatatgtgaaatcttacttattagtacacatcacacaaaaataatgaactaaaacaatatattcc

SEQ ID NO: 2133 - DNA, 200 bp, Conyza canadensis
cctgcttggatacaagcaccatacagaaagtagtatcacgttgaaaatgtccattgttaccactgctttggggttttgcctaatgtccatgttttcattttcgttttttatcgatcttgaacgaatctaaagctaactttagaaaagaactgcagacgcttaacaaaccaacgttagttgttcaaatcggatcaaaatga

SEQ ID NO: 2134 - DNA, 200 bp, Conyza canadensis
tcattttgatccgatttgaacaactaacgttggtttgttaagcgtctgcagttcttttctaaagttagctttagattcgttcaagatcgataaaaaacgaaaatgaaaacatggacattaggcaaaaccccaaagcagtggtaacaatggacattttcaacgtgatactactttctgtatggtgcttgtatccaagcagg

SEQ ID NO: 2135 - DNA, 200 bp, Conyza canadensis
agttgttcaaatcggatcaaaatgaacattactggtttcaacccgattctttgtaaacagacattgcaaagagagttgatctgtccaggtagcaattgatatatttattatcacttaaaatcaattaaatgatggtttaatgtacatattttgcaagtcaataaattatgtgacattgtcacgagtacactaccaaacag

SEQ ID NO: 2136 - DNA, 200 bp, Conyza canadensis
ctgtttggtagtgtactcgtgacaatgtcacataatttattgacttgcaaaatatgtacattaaaccatcatttaattgattttaagtgataataaatatatcaattgctacctggacagatcaactctctttgcaatgtctgtttacaaagaatcgggttgaaaccagtaatgttcattttgatccgatttgaacaact

SEQ ID NO: 2137 - DNA, 200 bp, Conyza canadensis
ttgtcacgagtacactaccaaacagttggatttgatgttgcttgtgagttgtacataatgcattaaagtatcttcatttggagatgtcgatttccgttatgaaaaacggttggtaagcttttatgtgcaagtatttaagagatgttaacacaatcttttgagttgtcacttaagagtgctaaaggagtttgtatatggtg

SEQ ID NO: 2138 - DNA, 200 bp, Conyza canadensis
caccatatacaaactcctttagcactcttaagtgacaactcaaaagattgtgttaacatctcttaaatacttgcacataaaagcttaccaaccgtttttcataacggaaatcgacatctccaaatgaagatactttaatgcattatgtacaactcacaagcaacatcaaatccaactgtttggtagtgtactcgtgacaa

SEQ ID NO: 2139 - DNA, 200 bp, Conyza canadensis
gtgctaaaggagtttgtatatggtggaacttgtactatcaaatattagtttgtacatattttccctcaaattagtaattaaacgtcaatacttgaatttgaatacgggatttcctcatctcctctttagacaaaagttgtgcttttgatctacgtttgttgcttgaaagtcaaaaccattttttgttggagttgctaggg

SEQ ID NO: 2140 - DNA, 200 bp, Conyza canadensis
ccctagcaactccaacaaaaaatggttttgactttcaagcaacaaacgtagatcaaaagcacaacttttgtctaaagaggagatgaggaaatcccgtattcaaattcaagtattgacgtttaattactaatttgagggaaaatatgtacaaactaatatttgatagtacaagttccaccatatacaaactcctttagcac

SEQ ID NO: 2141 - DNA, 200 bp, Conyza canadensis
ccattttttgttggagttgctagggactgttatcatgggtcgtcatacataatcaaaagattgtgatctaatcgagatataaactttgtggtgttgaatgaaatgagccattgtttgtagaatcttagctttgttaccattgagtaagatcatcggataacaattttagcaaatcttggccatctcattaatatacgaaa

SEQ ID NO: 2142 - DNA, 200 bp, Conyza canadensis
tttcgtatattaatgagatggccaagatttgctaaaattgttatccgatgatcttactcaatggtaacaaagctaagattctacaaacaatggctcatttcattcaacaccacaaagtttatatctcgattagatcacaatcttttgattatgtatgacgacccatgataacagtccctagcaactccaacaaaaaatgg

SEQ ID NO: 2143 - DNA, 200 bp, Conyza canadensis
ttggccatctcattaatatacgaaataccattttttatgtaaaataattagttactacgtatatgtacttatcatacaatgaactgacagtaattaagttataaatttgatgtaggtttaggtaaaacctaagaaaagctatattgaatgtgcactttattatgtctagttcatgaacattaaaggagagtaacaaccct

SEQ ID NO: 2144 - DNA, 200 bp, Conyza canadensis
agggttgttactctcctttaatgttcatgaactagacataataaagtgcacattcaatatagcttttcttaggttttacctaaacctacatcaaatttataacttaattactgtcagttcattgtatgataagtacatatacgtagtaactaattattttacataaaaaatggtatttcgtatattaatgagatggccaa

SEQ ID NO: 2145 - DNA, 200 bp, Digitaria sanguinalis
attaattcttcgtctttttgtctgcaaatcaccaagaaacataatggcagttcacattaacaacatatccaactttacttccaatctcaccaatacccacaatcccaaacccttccccaaatcattaccatcatcttttggatccaagttcaagaaccccatgaatcttgcttctgtttcttgcaaccaaaactttcaaa

SEQ ID NO: 2146 - DNA, 200 bp, Digitaria sanguinalis
tttgaaagttttggttgcaagaaacagaagcaagattcatggggttcttgaacttggatccaaaagatgatggtaatgatttggggaagggtttgggattgtgggtattggtgagattggaagtaaagttggatatgttgttaatgtgaactgccattatgtttcttggtgatttgcagacaaaaagacgaagaattaat

SEQ ID NO: 2147 - DNA, 200 bp, Digitaria sanguinalis
gtttcttgcaaccaaaactttcaaaaagatcactttctgttacagcttctgttgccaccacagagaagtcctcagtggaggagattgtgttgaagcccattaaagagatttctggaactgttaatttacctggatctaagtctctgtctaatcggatccttcttttagctgctcttgctgaggggactactgttgtagac

SEQ ID NO: 2148 - DNA, 200 bp, Digitaria sanguinalis
gtctacaacagtagtcccctcagcaagagcagctaaaagaaggatccgattagacagagacttagatccaggtaaattaacagttccagaaatctctttaatgggcttcaacacaatctcctccactgaggacttctctgtggtggcaacagaagctgtaacagaaagtgatctttttgaaagttttggttgcaagaaac

SEQ ID NO: 2149 - DNA, 200 bp, Digitaria sanguinalis
tgctgaggggactactgttgtagacaacttattgaacagtgacgatgttcattatatgcttggggcattgagagctctagggttgaatgttgaggaaaatggtcagattaaaagagcaactgtggaagggtgtggtggtgtgtttccggtgggtaaagaagctaaggatgaaatcaaactatttcttggaaatgcaggaa

SEQ ID NO: 2150 - DNA, 200 bp, Digitaria sanguinalis
ttcctgcatttccaagaaatagtttgatttcatccttagcttctttacccaccggaaacacaccaccacacccttccacagttgctcttttaatctgaccattttcctcaacattcaaccctagagctctcaatgccccaagcatataatgaacatcgtcactgttcaataagttgtctacaacagtagtcccctcagca

SEQ ID NO: 2151 - DNA, 200 bp, Digitaria sanguinalis
aaactatttcttggaaatgcaggaactgctatgcgtccgttgactgctgcagttactgctgctggtggaaattcaagctacatactagatggtgttccccgaatgagagagagaccaattggtgatttagtcacaggtcttaaacaactcggtgcagatgttgattgcttccttggtacaaattgcccacctgttcgtgt

SEQ ID NO: 2152 - DNA, 200 bp, Digitaria sanguinalis
acacgaacaggtgggcaatttgtaccaaggaagcaatcaacatctgcaccgagttgtttaagacctgtgactaaatcaccaattggtctctctctcattcggggaacaccatctagtatgtagcttgaatttccaccagcagcagtaactgcagcagtcaacggacgcatagcagttcctgcatttccaagaaatagttt

SEQ ID NO: 2153 - DNA, 200 bp, Digitaria sanguinalis
cttagctggtgctgccatcaccggtggcaccgttacggtggaaggttgtgggacaagtagtttacagggggatgtaaagtttgctgaggtccttggacatatgggcgcagaagtaacctggacagagaactcagtgacagtgaagggcccaccaagaaacgcttccggaagggggcacttgcgtccagtcgatgttaaca

SEQ ID NO: 2154 - DNA, 200 bp, Digitaria sanguinalis
tgttaacatcgactggacgcaagtgcccccttccggaagcgtttcttggtgggcccttcactgtcactgagttctctgtccaggttacttctgcgcccatatgtccaaggacctcagcaaactttacatccccctgtaaactacttgtcccacaaccttccaccgtaacggtgccaccggtgatggcagcaccagctaag

SEQ ID NO: 2155 - DNA, 200 bp, Digitaria sanguinalis
cacttgcgtccagtcgatgttaacatgaacaaaatgcccgatgttgccatgactcttgccgtcgttgctctctatgcagatggtcctacagccattagagatgttgctagctggagagtcaaagaaaccgaaaggatgattgccatttgcacagaactcagaaagttgggagcaactgtcgaagaagggccagattattg

SEQ ID NO: 2156 - DNA, 200 bp, Digitaria sanguinalis
caataatctggcccttcttcgacagttgctcccaactttctgagttctgtgcaaatggcaatcatcctttcggtttctttgactctccagctagcaacatctctaatggctgtaggaccatctgcatagagagcaacgacggcaagagtcatggcaacatcgggcattttgttcatgttaacatcgactggacgcaagtg

SEQ ID NO: 2157 - DNA, 200 bp, Digitaria sanguinalis; identical to SEQ ID NO: 2153

SEQ ID NO: 2158 - DNA, 200 bp, Digitaria sanguinalis; identical to SEQ ID NO: 2154

SEQ ID NO: 2159 - DNA, 200 bp, Digitaria sanguinalis
cacttgcgtccagtcgatgttaacatgaacaaaatgcccgatgttgccatgactcttgccgtcgttgctctctatgcagatggtcctacagccattagagatgttgctagctggagagtcaaagaaaccgaaaggatgattgccatttgcacagaactcagaaagttgggagcgacagttgaagaagggcctgactactg

SEQ ID NO: 2160 - DNA, 200 bp, Digitaria sanguinalis
cagtagtcaggcccttcttcaactgtcgctcccaactttctgagttctgtgcaaatggcaatcatcctttcggtttctttgactctccagctagcaacatctctaatggctgtaggaccatctgcatagagagcaacgacggcaagagtcatggcaacatcgggcattttgttcatgttaacatcgactggacgcaagtg

SEQ ID NO: 2161 - DNA, 200 bp, Digitaria sanguinalis
cagttgaagaagggcctgactactgtgtgatcactccacctgagcggttgaatgtggcagcaatagacacatatgatgatcacaggatggccatggctttctcccttgccgcttgtgcagatgttcctgtcaccatcaaggatcctgcttgcactcgtaagacgtttcccgattactttgaagttcttcagagattcacc

SEQ ID NO: 2162 - DNA, 200 bp, Digitaria sanguinalis
ggtgaatctctgaagaacttcaaagtaatcgggaaacgtcttacgagtgcaagcaggatccttgatggtgacaggaacatctgcacaagcggcaagggagaaagccatggccatcctgtgatcatcatatgtgtctattgctgccacattcaaccgctcaggtggagtgatcacacagtagtcaggcccttcttcaactg

SEQ ID NO: 2163 - DNA, 200 bp, Digitaria sanguinalis; identical to SEQ ID NO: 2153

SEQ ID NO: 2164 - DNA, 200 bp, Digitaria sanguinalis; identical to SEQ ID NO: 2154

SEQ ID NO: 2165 - DNA, 200 bp, Digitaria sanguinalis
cacttgcgtccagtcgatgttaacatgaacaaaatgcccgatgttgccatgactcttgccgtggttgctctctatgcagatggtcctacagccattagagatgttgctagctggagagtcaaagaaaccgaaaggatgattgccatttgcacagaactcagaaagttgggagcgacagttgaagaagggcctgactactg

SEQ ID NO: 2166 - DNA, 200 bp, Digitaria sanguinalis
cagtagtcaggcccttcttcaactgtcgctcccaactttctgagttctgtgcaaatggcaatcatcctttcggtttctttgactctccagctagcaacatctctaatggctgtaggaccatctgcatagagagcaaccacggcaagagtcatggcaacatcgggcattttgttcatgttaacatcgactggacgcaagtg

SEQ ID NO: 2167 - DNA, 200 bp, Digitaria sanguinalis; identical to SEQ ID NO: 2161

SEQ ID NO: 2168 - DNA, 200 bp, Digitaria sanguinalis; identical to SEQ ID NO: 2162

SEQ ID NO: 2169 - DNA, 200 bp, Digitaria sanguinalis
ggattggagggctacctggcggcaaggttaagctgtctggttcaatcagcagtcaatacttgagtgccttgctgatggctgctcctttagctcttggggatgtggagattgagatcattgataaactaatctccattccctatgtcgaaatgacattgagattgatggagcgttttggcgtgaaagcagagcactctgat

SEQ ID NO: 2170 - DNA, 200 bp, Digitaria sanguinalis
atcagagtgctctgctttcacgccaaaacgctccatcaatctcaatgtcatttcgacatagggaatggagattagtttatcaatgatctcaatctccacatccccaagagctaaaggagcagccatcagcaaggcactcaagtattgactgctgattgaaccagacagcttaaccttgccgccaggtagccctccaatcc

SEQ ID NO: 2171 - DNA, 200 bp, Digitaria sanguinalis
tggcgtgaaagcagagcactctgatagctgggacaggttctacatcaagggaggtcaaaaatacaagtcccctaaaaatgcatatgtggaaggagatgcctcaagtgctagctatttcttggctggtgctgcaattactggagggactgtgacagttgaagggtgtggcaccaccagtttgcagggtgatgtgaaatttg

SEQ ID NO: 2172 - DNA, 200 bp, Digitaria sanguinalis
caaatttcacatcaccctgcaaactggtggtgccacacccttcaactgtcacagtccctccagtaattgcagcaccagccaagaaatagctagcacttgaggcatctccttccacatatgcatttttaggggacttgtatttttgacctcccttgatgtagaacctgtcccagctatcagagtgctctgctttcacgcca

SEQ ID NO: 2173 - DNA, 200 bp, Digitaria sanguinalis
agtttgcagggtgatgtgaaatttgctgaggttctggagatgatgggagcgaaggttacatggactgagacaagtgtaactgttactggtccaccgcgggagccatttgggaggaaacacctaaaacccattgacgtcaacatgaacaaaatgcctgatgtcgcaatgactcttgctgtggttgccctctttgctgatgg

SEQ ID NO: 2174 - DNA, 200 bp, Digitaria sanguinalis
ccatcagcaaagagggcaaccacagcaagagtcattgcgacatcaggcattttgttcatgttgacgtcaatgggttttaggtgtttcctcccaaatggctcccgcggtggaccagtaacagttacacttgtctcagtccatgtaaccttcgctcccatcatctccagaacctcagcaaatttcacatcaccctgcaaact

SEQ ID NO: 2175 - DNA, 200 bp, Digitaria sanguinalis
tgtagagggtgatgcttcaagtgcaagttacttcttggctggagctgctataactggtggcactatcactgttgaaggttgtggaacaagtagtttgcagggtgatgtgaaatttgcggaggttcttggacaaatgggggctgaagtaacatggaccgaaaactctgttacagtgaggggtccaccgaggggttcttctg

SEQ ID NO: 2176 - DNA, 200 bp, Digitaria sanguinalis
cagaagaacccctcggtggacccctcactgtaacagagttttcggtccatgttacttcagcccccatttgtccaagaacctccgcaaatttcacatcaccctgcaaactacttgttccacaaccttcaacagtgatagtgccaccagttatagcagctccagccaagaagtaacttgcacttgaagcatcaccctctaca

SEQ ID NO: 2177 - DNA, 200 bp, Digitaria sanguinalis
aggggtccaccgaggggttcttctggaagtaaacatttgcgtgctgtagatgttaacatgaacaaaatgcccgatgttgccatgactcttgccgtcgttgctctctatgcagatggtcctacagccattagagatgttgctagctggagagtcaaagaaaccgaaaggatgattgccatttgcacagaactcagaaagtt

SEQ ID NO: 2178 - DNA, 200 bp, Digitaria sanguinalis
aactttctgagttctgtgcaaatggcaatcatcctttcggtttctttgactctccagctagcaacatctctaatggctgtaggaccatctgcatagagagcaacgacggcaagagtcatggcaacatcgggcattttgttcatgttaacatctacagcacgcaaatgtttacttccagaagaacccctcggtggacccct

SEQ ID NO: 2179 - DNA, 200 bp, Digitaria sanguinalis; identical to SEQ ID NO: 2175

SEQ ID NO: 2180 - DNA, 200 bp, Digitaria sanguinalis; identical to SEQ ID NO: 2176

SEQ ID NO: 2181 - DNA, 200 bp, Digitaria sanguinalis
aggggtccaccgaggggttcttctggaagtaaacatttgcgtgctgtagatgttaacatgaacaaaatgcccgatgttgccatgactcttgccgtggttgctctctatgcagatggtcctacagccattagagatgttgctagctggagagtcaaagaaaccgaaaggatgattgccatttgcacagaactcagaaagtt

SEQ ID NO: 2182 - DNA, 200 bp, Digitaria sanguinalis
aactttctgagttctgtgcaaatggcaatcatcctttcggtttctttgactctccagctagcaacatctctaatggctgtaggaccatctgcatagagagcaaccacggcaagagtcatggcaacatcgggcattttgttcatgttaacatctacagcacgcaaatgtttacttccagaagaacccctcggtggacccct

SEQ ID NO: 2183 - DNA, 200 bp, Digitaria sanguinalis; identical to SEQ ID NO: 2175

SEQ ID NO: 2184 - DNA, 200 bp, Digitaria sanguinalis; identical to SEQ ID NO: 2176

SEQ ID NO: 2185 - DNA, 200 bp, Digitaria sanguinalis; identical to SEQ ID NO: 2181

SEQ ID NO: 2186 - DNA, 200 bp, Digitaria sanguinalis; identical to SEQ ID NO: 2182

SEQ ID NO: 2187 - DNA, 200 bp, Digitaria sanguinalis
ccatttgcacagaactcagaaagttgggagcgacagttgaagaagggcctgactactgtgtgatcactccacctgagcggttgaatgtggcagcaatagacacatatgatgatcacaggatggccatggctttctcccttgccgcttgtgcagatgttcctgtcaccatcaaggatcctgcttgcactcgtaagacgttt

SEQ ID NO: 2188 - DNA, 200 bp, Digitaria sanguinalis
aaacgtcttacgagtgcaagcaggatccttgatggtgacaggaacatctgcacaagcggcaagggagaaagccatggccatcctgtgatcatcatatgtgtctattgctgccacattcaaccgctcaggtggagtgatcacacagtagtcaggcccttcttcaactgtcgctcccaactttctgagttctgtgcaaatgg

SEQ ID NO: 2189 - DNA, 200 bp, Euphorbia heterophylla
atggcacaagttagcaaattctgcaatggagttcaaaaaacctccattttccccaattttcctaaaccggaaacccccaaatcggtgccttcgttttcaattaggtcaagttttaacgggtctccgatttcatcgggtctaaatcggcgccgaacaaagggcgattgtattgttgttaaaggtaaagctagttcgtttaa

SEQ ID NO: 2190 - DNA, 200 bp, Euphorbia heterophylla
ttaaacgaactagctttacctttaacaacaatacaatcgccctttgttcggcgccgatttagacccgatgaaatcggagacccgttaaaacttgacctaattgaaaacgaaggcaccgatttgggggtttccggtttaggaaaattggggaaaatggaggttttttgaactccattgcagaatttgctaacttgtgccat

SEQ ID NO: 2191 - DNA, 200 bp, Euphorbia heterophylla
ttaaaggtaaagctagttcgtttaaagtttcagcttcagtagccacaacagagaaaccctctacttcaccggagatcgtgctgcaaccaattaaagaaatctccggcactgtcactttgccgggttctaagtcgctgtccaatcggattcttctcctcgctgctttatctgagggcacaactgttgtggacaacttgcta

SEQ ID NO: 2192 - DNA, 200 bp, Euphorbia heterophylla
tagcaagttgtccacaacagttgtgccctcagataaagcagcgaggagaagaatccgattggacagcgacttagaacccggcaaagtgacagtgccggagatttctttaattggttgcagcacgatctccggtgaagtagagggtttctctgttgtggctactgaagctgaaactttaaacgaactagctttacctttaa

SEQ ID NO: 2193 - DNA, 200 bp, Euphorbia heterophylla
cacaactgttgtggacaacttgctaaacagcgatgatgttcattacatgcttggcgcacttaaaacattaggattacgagtagaagacaatagtgaactcaaacaagctattgtggaaggttgtggcggtcaattcccagtgggtaaagagtcaaagaaagacattcaactttttctcggaaatgcaggaactgcaatgc

SEQ ID NO: 2194 - DNA, 200 bp, Euphorbia heterophylla
gcattgcagttcctgcatttccgagaaaaagttgaatgtctttctttgactctttacccactgggaattgaccgccacaaccttccacaatagcttgtttgagttcactattgtcttctactcgtaatcctaatgttttaagtgcgccaagcatgtaatgaacatcatcgctgtttagcaagttgtccacaacagttgtg

SEQ ID NO: 2195 - DNA, 200 bp, Euphorbia heterophylla
ctcggaaatgcaggaactgcaatgcgtcctttgactgctgcagttactgcagccggtggaaattctagctacatacttgatggagttccaagaatgagggagagaccaattggagatttggtaaccggtttgaagcagcttggtgctgatgtcacttgctcttccacaaattgccccccggttcatgtcaatgcaaatgg

SEQ ID NO: 2196 - DNA, 200 bp, Euphorbia heterophylla
ccatttgcattgacatgaaccggggggcaatttgtggaagagcaagtgacatcagcaccaagctgcttcaaaccggttaccaaatctccaattggtctctccctcattcttggaactccatcaagtatgtagctagaatttccaccggctgcagtaactgcagcagtcaaaggacgcattgcagttcctgcatttccgag

SEQ ID NO: 2197 - DNA, 200 bp, Euphorbia heterophylla
ccccggttcatgtcaatgcaaatggcggcctacctgggggaaaagttaagctttcaggatcaataagtagccaatacttgactgctttgctcatggcagctcctttggctctgggagatgtagaaatcgagattatcgataaactgatttcgattccttacgttgagatgactttaaagctaatggaacgctacggtgtt

SEQ ID NO: 2198 - DNA, 200 bp, Euphorbia heterophylla
aacaccgtagcgttccattagctttaaagtcatctcaacgtaaggaatcgaaatcagtttatcgataatctcgatttctacatctcccagagccaaaggagctgccatgagcaaagcagtcaagtattggctacttattgatcctgaaagcttaacttttcccccaggtaggccgccatttgcattgacatgaaccgggg

SEQ ID NO: 2199 - DNA, 200 bp, Euphorbia heterophylla
aaagctaatggaacgctacggtgtttctgtacaacacagtaatagctgggatcgtttcttcatcccaggaggtcaaaagtacaagtcgcctggaaattcttatgttgaaggagatgcctcgagtgccagctactttctagccggagcagcaattaccggtggaactatcactgttgaaggttgtgggactagcagtttgc

SEQ ID NO: 2200 - DNA, 200 bp, Euphorbia heterophylla
gcaaactgctagtcccacaaccttcaacagtgatagttccaccggtaattgctgctccggctagaaagtagctggcactcgaggcatctccttcaacataagaatttccaggcgacttgtacttttgacctcctgggatgaagaaacgatcccagctattactgtgttgtacagaaacaccgtagcgttccattagcttt

SEQ ID NO: 2201 - DNA, 200 bp, Euphorbia heterophylla
gaaggttgtgggactagcagtttgcagggagatgtgaaattcgccgaggttttggagaagatgggagctagagttacctggacggagaacagtgtaactgtgactggaccaccacgcgattctcctcgtcaaaaacacttgcgtgctatcgatgtgaatatgaacaaaatgccagatgttgctatgacattagctgtggt

SEQ ID NO: 2202 - DNA, 200 bp, Euphorbia heterophylla
accacagctaatgtcatagcaacatctggcattttgttcatattcacatcgatagcacgcaagtgtttttgacgaggagaatcgcgtggtggtccagtcacagttacactgttctccgtccaggtaactctagctcccatcttctccaaaacctcggcgaatttcacatctccctgcaaactgctagtcccacaaccttc

SEQ ID NO: 2203 - DNA, 200 bp, Euphorbia heterophylla
atgttgctatgacattagctgtggttgcacttttcgctgatggtcccactgccatcagagatgtggcaagttggagagtgaaagaaaccgaaaggatgattgctgtttgcacagaactcaggaagttaggagcaacagtagaggaaggagcagattactgtgtgataactccgccggaaaaactaaatataacggagatt

SEQ ID NO: 2204 - DNA, 200 bp, Euphorbia heterophylla
aatctccgttatatttagtttttccggcggagttatcacacagtaatctgctccttcctctactgttgctcctaacttcctgagttctgtgcaaacagcaatcatcctttcggtttctttcactctccaacttgccacatctctgatggcagtgggaccatcagcgaaaagtgcaaccacagctaatgtcatagcaacat

SEQ ID NO: 2205 - DNA, 200 bp, Euphorbia heterophylla
atgttgaaggagatgcctcgagtgccagctactttctagccggagcagcaattaccggtggaactatcactgttgaaggttgtgggactagcagtttgcagggagatgtgaaattcgccgaggttttggagaagatgggagctagagttacctggacggagaacagtgtaactgtgactggaccaccacgcgattctcct

SEQ ID NO: 2206 - DNA, 200 bp, Euphorbia heterophylla
aggagaatcgcgtggtggtccagtcacagttacactgttctccgtccaggtaactctagctcccatcttctccaaaacctcggcgaatttcacatctccctgcaaactgctagtcccacaaccttcaacagtgatagttccaccggtaattgctgctccggctagaaagtagctggcactcgaggcatctccttcaacat

SEQ ID NO: 2207 - DNA, 200 bp, Euphorbia heterophylla
gactggaccaccacgcgattctcctcgtcaaaaacacttgcgtgctatcgatgtgaatatgaacaaaatgccagatgttgctatgacattagctgtggttgcacttttcgctgatggtcccactgccatcagagatgtggcaagttggagagtgaaagaaaccgaaaggatgattgctgtttgcacagaacttaggaagt

SEQ ID NO: 2208 - DNA, 200 bp, Euphorbia heterophylla
acttcctaagttctgtgcaaacagcaatcatcctttcggtttctttcactctccaacttgccacatctctgatggcagtgggaccatcagcgaaaagtgcaaccacagctaatgtcatagcaacatctggcattttgttcatattcacatcgatagcacgcaagtgtttttgacgaggagaatcgcgtggtggtccagtc

SEQ ID NO: 2209 - DNA, 200 bp, Euphorbia heterophylla
gctgtttgcacagaacttaggaagttaggagcaaaagttgaagaaggggaagattactgtgtgataactccacccgagaaactaaatataacggagattgacacttacgatgatcaccgaatggcgatggccttctctcttgctgcctgtggggatgttccggtcactattaaagatcccggttgtactcgaaaaacttt

SEQ ID NO: 2210 - DNA, 200 bp, Euphorbia heterophylla
aaagtttttcgagtacaaccgggatctttaatagtgaccggaacatccccacaggcagcaagagagaaggccatcgccattcggtgatcatcgtaagtgtcaatctccgttatatttagtttctcgggtggagttatcacacagtaatcttccccttcttcaacttttgctcctaacttcctaagttctgtgcaaacagc

SEQ ID NO: 2211 - DNA, 200 bp, Euphorbia heterophylla
atcccggttgtactcgaaaaactttccctgactatttcaagtcctccaaagctttactaagcaatgaccacgaacccctgaaactttactagaattggatcaggctcttatattcaatggatcattcaagtgagtttatgttattaatgtgccgggcataacagattttttataccggatgaatttgtattttatgtttt

SEQ ID NO: 2212 - DNA, 200 bp, Euphorbia heterophylla
aaaacataaaatacaaattcatccggtataaaaaatctgttatgcccggcacattaataacataaactcacttgaatgatccattgaatataagagcctgatccaattctagtaaagtttcaggggttcgtggtcattgcttagtaaagctttggaggacttgaaatagtcagggaaagtttttcgagtacaaccgggat

SEQ ID NO: 2213 - DNA, 200 bp, Euphorbia heterophylla
attaattacttcaaaataagaaaacaactgacttcagtaattattttttcttaacttctattttcgtttttagatagtatagtcaagcaacacaaattagttcttcgagatagtgtcattgattgattttgggtctaaactttagttccttctaaagcccaagcccaagctcaagcttggttatgggaaattttacatcc

SEQ ID NO: 2214 - DNA, 200 bp, Euphorbia heterophylla
ggatgtaaaatttcccataaccaagcttgagcttgggcttgggctttagaaggaactaaagtttagacccaaaatcaatcaatgacactatctcgaagaactaatttgtgttgcttgactatactatctaaaaacgaaaatagaagttaagaaaaaataattactgaagtcagttgttttcttattttgaagtaattaat

SEQ ID NO: 2215 - DNA, 200 bp, Euphorbia heterophylla
cttggttatgggaaattttacatccaagttcactttttatttttttttcctacctggttcatcggagctttactccgactacatccagatctgacccgggtcgcgcacctggctatgatgggtgagtctcccaataaggattttttgcgttcaccaggactcgaactcgagaccttgcttaagcaataccaagtcgctta

SEQ ID NO: 2216 - DNA, 200 bp, Euphorbia heterophylla
taagcgacttggtattgcttaagcaaggtctcgagttcgagtcctggtgaacgcaaaaaatccttattgggagactcacccatcatagccaggtgcgcgacccgggtcagatctggatgtagtcggagtaaagctccgatgaaccaggtaggaaaaaaaaataaaaagtgaacttggatgtaaaatttcccataaccaag

SEQ ID NO: 2217 - DNA, 200 bp, Euphorbia heterophylla
tgcttaagcaataccaagtcgcttaccacttggaccaaattcactttaactcgagataaataaaaaattcacattgactcattaatacactattttttttaaccaattagtctttaagcttctccagatttattaaataattaaaacaataatcaatatgaatgttttttttatcacgtgtaaaacataatataaaatgg

SEQ ID NO: 2218 - DNA, 200 bp, Euphorbia heterophylla
ccattttatattatgttttacacgtgataaaaaaaacattcatattgattattgttttaattatttaataaatctggagaagcttaaagactaattggttaaaaaaaatagtgtattaatgagtcaatgtgaattttttatttatctcgagttaaagtgaatttggtccaagtggtaagcgacttggtattgcttaagca

SEQ ID NO: 2219 - DNA, 200 bp, Euphorbia heterophylla
acgtgtaaaacataatataaaatggacttggaagacgtgtagcctatatcattttataaaaaaaattatgtatacacttattaagttgtatgaatatttttaaatagtaaacacttagcaattgatatctctagttataaaggttgtcgatttcccacctgataacatgattgacaaaaatgtttggtctaatgaacttt

SEQ ID NO: 2220 - DNA, 200 bp, Euphorbia heterophylla
aaagttcattagaccaaacatttttgtcaatcatgttatcaggtgggaaatcgacaacctttataactagagatatcaattgctaagtgtttactatttaaaaatattcatacaacttaataagtgtatacataattttttttataaaatgatataggctacacgtcttccaagtccattttatattatgttttacacgt

SEQ ID NO: 2221 - DNA, 200 bp, Euphorbia heterophylla
aaaaatgtttggtctaatgaactttgatactataataaattggtgaatattaggactttattttttataaggtaatagttactttatttttcattattgttggattagtgatgtggatttcaaaacaatggtagactagatgtagtaaattacaaacaaagttatcataaaatttttaattgtatttattatatttatat

SEQ ID NO: 2222 - DNA, 200 bp, Euphorbia heterophylla
atataaatataataaatacaattaaaaattttatgataactttgtttgtaatttactacatctagtctaccattgttttgaaatccacatcactaatccaacaataatgaaaaataaagtaactattaccttataaaaaataaagtcctaatattcaccaatttattatagtatcaaagttcattagaccaaacattttt

SEQ ID NO: 2223 - DNA, 200 bp, Euphorbia heterophylla
ttaattgtatttattatatttatattatataatctcacaaaatataattataaaagtagatatgcttatatatctataataagcaccaaacctacccactttccctccctcaccaaacatgccgttaatggaccaaaatgctgatttggcaaaatctaattggtaagttgctaatcacataataacaaaattgactctat

SEQ ID NO: 2224 - DNA, 200 bp, Euphorbia heterophylla
atagagtcaattttgttattatgtgattagcaacttaccaattagattttgccaaatcagcattttggtccattaacggcatgtttggtgagggagggaaagtgggtaggtttggtgcttattatagatatataagcatatctacttttataattatattttgtgagattatataatataaatataataaatacaattaa

SEQ ID NO: 2225 - DNA, 200 bp, Euphorbia heterophylla
cacataataacaaaattgactctatatcttcaaaaccttggctatctaccacgtcccactaccatacgccacttctcaatcttaccaacccctttttctttttggccccataatattcttaacatttcaatttagcccacaaacttttagagcaagtcaagtcatttttttaaatttcattcgtcaaactccattttgag

SEQ ID NO: 2226 - DNA, 200 bp, Euphorbia heterophylla
ctcaaaatggagtttgacgaatgaaatttaaaaaaatgacttgacttgctctaaaagtttgtgggctaaattgaaatgttaagaatattatggggccaaaaagaaaaaggggttggtaagattgagaagtggcgtatggtagtgggacgtggtagatagccaaggttttgaagatatagagtcaattttgttattatgtg

SEQ ID NO: 2227 - DNA, 200 bp, Euphorbia heterophylla
ttcattcgtcaaactccattttgaggaatttccattactttcattttaactatcattctcatttttcatattaaattatcaaaaaataataatattttattattatattaatttatgtagatcatttatgttatgttgtaatgaactaataaaataattaaaaacattaaaattcaaacaaagtaataaaataatgattc

SEQ ID NO: 2228 - DNA, 200 bp, Euphorbia heterophylla
gaatcattattttattactttgtttgaattttaatgtttttaattattttattagttcattacaacataacataaatgatctacataaattaatataataataaaatattattattttttgataatttaatatgaaaaatgagaatgatagttaaaatgaaagtaatggaaattcctcaaaatggagtttgacgaatgaa

SEQ ID NO: 2229 - DNA, 200 bp, Euphorbia heterophylla
aaacaaagtaataaaataatgattccttgaaatagagaatgcccatatacgagaaaccctcgttttgaagaataccgtatggagaatggttggacttaggtcatttttatttagattaatactcaatgtagttcaatttagtaaccaataagaattggtacaagtggtaagcgacttagtatcgcttaggcaaggtctcg

SEQ ID NO: 2230 - DNA, 200 bp, Euphorbia heterophylla
cgagaccttgcctaagcgatactaagtcgcttaccacttgtaccaattcttattggttactaaattgaactacattgagtattaatctaaataaaaatgacctaagtccaaccattctccatacggtattcttcaaaacgagggtttctcgtatatgggcattctctatttcaaggaatcattattttattactttgttt

SEQ ID NO: 2231 - DNA, 200 bp, Euphorbia heterophylla
ttagtatcgcttaggcaaggtctcgagttcgagtcttggtgtacgcaaaaaagtccttactgggagactcacccaccataactaggtgcgcgacccgggtcggatctggatgtagttggagcaaagctccggtgaaccagatgaaattaaaaaaaaatgtaatccaattcagtttaaaaaaacaaaacttttagttaata

SEQ ID NO: 2232 - DNA, 200 bp, Euphorbia heterophylla
tattaactaaaagttttgtttttttaaactgaattggattacatttttttttaatttcatctggttcaccggagctttgctccaactacatccagatccgacccgggtcgcgcacctagttatggtgggtgagtctcccagtaaggacttttttgcgtacaccaagactcgaactcgagaccttgcctaagcgatactaa

SEQ ID NO: 2233 - DNA, 200 bp, Euphorbia heterophylla
aaaaaaacaaaacttttagttaatatttgttattgtaattgaaaatcaaataatgttgtgggtcaaatttggaaaattgtgaaagatgagttagttggaagaatgaaacacctcaattgtcgttacaataacgcctaaaacctcaccaatctcaaatccagagcagccatttttcttcttccccgtcgagaccagcaaga

SEQ ID NO: 2234 - DNA, 200 bp, Euphorbia heterophylla
tcttgctggtctcgacggggaagaagaaaaatggctgctctggatttgagattggtgaggttttaggcgttattgtaacgacaattgaggtgtttcattcttccaactaactcatctttcacaattttccaaatttgacccacaacattatttgattttcaattacaataacaaatattaactaaaagttttgttttttt

SEQ ID NO: 2235 - DNA, 200 bp, Euphorbia heterophylla
ttcttccccgtcgagaccagcaagaatcagagatacacggagattggtggagggggatcctgtagctctagttaaatggcacaagttagcaaattctgcaatggagttcaaaaaacctccattttccccaattttcctaaaccggaaacccccaaatcggtgccttcgttttcaattaggtcaagttttaacgggtctcc

SEQ ID NO: 2236 - DNA, 200 bp, Euphorbia heterophylla
ggagacccgttaaaacttgacctaattgaaaacgaaggcaccgatttgggggtttccggtttaggaaaattggggaaaatggaggttttttgaactccattgcagaatttgctaacttgtgccatttaactagagctacaggatccccctccaccaatctccgtgtatctctgattcttgctggtctcgacggggaagaa

SEQ ID NO: 2237 - DNA, 200 bp, Euphorbia heterophylla
ttaggtcaagttttaacgggtctccgatttcatcgggtctaaatcggcgccgaacaaagggcgattgtattgttgttaaaggtaaagctagttcgtttaaagtttcagcttcagtagccacaacagagaaaccctctacttcaccggagatcgtgctgcaaccaattaaagaaatctccggcactgtcactttgccgggt

SEQ ID NO: 2238 - DNA, 200 bp, Euphorbia heterophylla
acccggcaaagtgacagtgccggagatttctttaattggttgcagcacgatctccggtgaagtagagggtttctctgttgtggctactgaagctgaaactttaaacgaactagctttacctttaacaacaatacaatcgccctttgttcggcgccgatttagacccgatgaaatcggagacccgttaaaacttgacctaa

SEQ ID NO: 2239 - DNA, 200 bp, Euphorbia heterophylla
ctccggcactgtcactttgccgggttctaagtcgctgtccaatcggattcttctcctcgctgctttatctgaggtatgaattgttctggatttttcggcgattgcattctgtgccgttgaattgtaagctgcggttttagtataatcataattagatgaagcagaaaggaacttagttcttttgcattttatgttcagat

SEQ ID NO: 2240 - DNA, 200 bp, Euphorbia heterophylla
atctgaacataaaatgcaaaagaactaagttcctttctgcttcatctaattatgattatactaaaaccgcagcttacaattcaacggcacagaatgcaatcgccgaaaaatccagaacaattcatacctcagataaagcagcgaggagaagaatccgattggacagcgacttagaacccggcaaagtgacagtgccggag

SEQ ID NO: 2241 - DNA, 200 bp, Euphorbia heterophylla
gttcttttgcattttatgttcagattcacatagatcactaactgttggggaaatcaggcaatgaaggctagataaatatgaagttatatcgaacactttgattgaaacttatttagctttctaccaaataatttattcggataaaatcagaaatcgacaagaacttagaacgaatgttgttgtgatgttatgaaacaaaa

SEQ ID NO: 2242 - DNA, 200 bp, Euphorbia heterophylla
ttttgtttcataacatcacaacaacattcgttctaagttcttgtcgatttctgattttatccgaataaattatttggtagaaagctaaataagtttcaatcaaagtgttcgatataacttcatatttatctagccttcattgcctgatttccccaacagttagtgatctatgtgaatctgaacataaaatgcaaaagaac

SEQ ID NO: 2243 - DNA, 200 bp, Euphorbia heterophylla
gttgttgtgatgttatgaaacaaaaaagtctgtaaaacgttatatttgccaatgcgttctctctctatatatatagagaaccgaaataaccgtcatatgttaactgtttttgtagttattttcgtctaagtcgcgacatggtccaaatccaaaattcacgaattttccaagggaacttttgttggaaataaaatttgctt

SEQ ID NO: 2244 - DNA, 200 bp, Euphorbia heterophylla
aagcaaattttatttccaacaaaagttcccttggaaaattcgtgaattttggatttggaccatgtcgcgacttagacgaaaataactacaaaaacagttaacatatgacggttatttcggttctctatatatatagagagagaacgcattggcaaatataacgttttacagacttttttgtttcataacatcacaacaac

SEQ ID NO: 2245 - DNA, 200 bp, Euphorbia heterophylla
cttttgttggaaataaaatttgcttccgaaacaccgagctgtcggcctggggcgctgccccaggaccccgctaggggctgccgccccttaggactccgcactcgggggcgatgcccccggaccccctaaatcgtaaacagtacccgaacaagtgtgcactccgcacttttccaaacttgtttcggtgagacgttacaatt

SEQ ID NO: 2246 - DNA, 200 bp, Euphorbia heterophylla
aattgtaacgtctcaccgaaacaagtttggaaaagtgcggagtgcacacttgttcgggtactgtttacgatttagggggtccgggggcatcgcccccgagtgcggagtcctaaggggcggcagcccctagcggggtcctggggcagcgccccaggccgacagctcggtgtttcggaagcaaattttatttccaacaaaag

SEQ ID NO: 2247 - DNA, 200 bp, Euphorbia heterophylla
cttgtttcggtgagacgttacaattacattggacaaacttagttaatccaattacactaaaataataacaacttttactttagctcgaccccagtttggggcactacccccaaaatccgaatattgaacttgaacaaagcatgcactccacactctcttgacttgttcaatgaaatatcacaatcgcacaattagttgat

SEQ ID NO: 2248 - DNA, 200 bp, Euphorbia heterophylla
atcaactaattgtgcgattgtgatatttcattgaacaagtcaagagagtgtggagtgcatgctttgttcaagttcaatattcggattttgggggtagtgccccaaactggggtcgagctaaagtaaaagttgttattattttagtgtaattggattaactaagtttgtccaatgtaattgtaacgtctcaccgaaacaag

SEQ ID NO: 2249 - DNA, 200 bp, Euphorbia heterophylla
tatcacaatcgcacaattagttgatctaattacattaaaatactactaacaacacttaatcaacagtctatcatgttgttggtttttctttgaacttctgaagcaggatagataaagatcgttccttcccactgattgatactatcattgcattgacctttaaattatcttcttttggtgcatatagattacagatttag

SEQ ID NO: 2250 - DNA, 200 bp, Euphorbia heterophylla
ctaaatctgtaatctatatgcaccaaaagaagataatttaaaggtcaatgcaatgatagtatcaatcagtgggaaggaacgatctttatctatcctgcttcagaagttcaaagaaaaaccaacaacatgatagactgttgattaagtgttgttagtagtattttaatgtaattagatcaactaattgtgcgattgtgata

SEQ ID NO: 2251 - DNA, 200 bp, Euphorbia heterophylla
tggtgcatatagattacagatttagttaaatcacgtaaagtttgggctgaatttttgttaaaataaacttcaaatttgaaatcttactaatttttcagtccctaggtttccatatcccctttatttctaaaagccgttgttttgttggcatgccttataattgatttttcgtttatttcttgcaataaacaactttaaac

SEQ ID NO: 2252 - DNA, 200 bp, Euphorbia heterophylla
gtttaaagttgtttattgcaagaaataaacgaaaaatcaattataaggcatgccaacaaaacaacggcttttagaaataaaggggatatggaaacctagggactgaaaaattagtaagatttcaaatttgaagtttattttaacaaaaattcagcccaaactttacgtgatttaactaaatctgtaatctatatgcacca

SEQ ID NO: 2253 - DNA, 200 bp, Euphorbia heterophylla
tttcttgcaataaacaactttaaactctggccttggaagcttttttacctgtgtaaagtagtgattctgagtgttctacattcaaaattttgcttctcgagaccataaaacggtgctttacatctattgtccagggcacaactgttgtggacaacttgctaaacagcgatgatgttcattacatgcttggcgcacttaaa

SEQ ID NO: 2254 - DNA, 200 bp, Euphorbia heterophylla
tttaagtgcgccaagcatgtaatgaacatcatcgctgtttagcaagttgtccacaacagttgtgccctggacaatagatgtaaagcaccgttttatggtctcgagaagcaaaattttgaatgtagaacactcagaatcactactttacacaggtaaaaaagcttccaaggccagagtttaaagttgtttattgcaagaaa

SEQ ID NO: 2255 - DNA, 200 bp, Euphorbia heterophylla
tcattacatgcttggcgcacttaaaacattaggattacgagtagaagacaatagtgaactcaaacaagctattgtggaaggttgtggcggtcaattcccagtgggtaaagagtcaaagaaagacattcaactttttctcggaaatgcaggaactgcaatgcgtcctttgactgctgcagttactgcagccggtggaaatt

SEQ ID NO: 2256 - DNA, 200 bp, Euphorbia heterophylla
aatttccaccggctgcagtaactgcagcagtcaaaggacgcattgcagttcctgcatttccgagaaaaagttgaatgtctttctttgactctttacccactgggaattgaccgccacaaccttccacaatagcttgtttgagttcactattgtcttctactcgtaatcctaatgttttaagtgcgccaagcatgtaatga

SEQ ID NO: 2257 - DNA, 200 bp, Euphorbia heterophylla
gcagttactgcagccggtggaaattctaggtttacttttccccctttttttaccctctttagacatgccttgatttattgaacaataagcacttattttccacgacttatgagattctatatggtttaacatgtatctaatgtgcttcagctacatacttgatggagttccaagaatgagggagagaccaattggagatt

SEQ ID NO: 2258 - DNA, 200 bp, Euphorbia heterophylla
aatctccaattggtctctccctcattcttggaactccatcaagtatgtagctgaagcacattagatacatgttaaaccatatagaatctcataagtcgtggaaaataagtgcttattgttcaataaatcaaggcatgtctaaagagggtaaaaaaagggggaaaagtaaacctagaatttccaccggctgcagtaactgc

SEQ ID NO: 2259 - DNA, 200 bp, Euphorbia heterophylla
atgagggagagaccaattggagatttggtaaccggtttgaagcagcttggtgctgatgtcacttgctcttccacaaattgccccccggttcatgtcaatgcaaatggcggcctacctgggggaaaagtatgtatcgatttggctatctgtttgctattaatttccagaacttttcgtgaaaaatgtaacttttcagaaaa

SEQ ID NO: 2260 - DNA, 200 bp, Euphorbia heterophylla
ttttctgaaaagttacatttttcacgaaaagttctggaaattaatagcaaacagatagccaaatcgatacatacttttcccccaggtaggccgccatttgcattgacatgaaccggggggcaatttgtggaagagcaagtgacatcagcaccaagctgcttcaaaccggttaccaaatctccaattggtctctccctcat

SEQ ID NO: 2261 - DNA, 200 bp, Euphorbia heterophylla
gtgaaaaatgtaacttttcagaaaagcaatcctaaattggccctatagtcttattagtaacggtatcacaatatgtttcttctcttttgaattgtacctaattttccgtgtcttcactttaaaggttaagctttcaggatcaataagtagccaatacttgactgctttgctcatggcagctcctttggctctgggagatg

SEQ ID NO: 2262 - DNA, 200 bp, Euphorbia heterophylla
catctcccagagccaaaggagctgccatgagcaaagcagtcaagtattggctacttattgatcctgaaagcttaacctttaaagtgaagacacggaaaattaggtacaattcaaaagagaagaaacatattgtgataccgttactaataagactatagggccaatttaggattgcttttctgaaaagttacatttttcac

SEQ ID NO: 2263 - DNA, 200 bp, Euphorbia heterophylla
gcagctcctttggctctgggagatgtagaaatcgagattatcgataaactgatttcgattccttacgttgagatgactttaaagctaatggaacgctacggtgtttctgtacaacacagtaatagctgggatcgtttcttcatcccaggaggtcaaaagtacaagtaagtattttttctagattcacaaattcagaaagc

SEQ ID NO: 2264 - DNA, 200 bp, Euphorbia heterophylla
gctttctgaatttgtgaatctagaaaaaatacttacttgtacttttgacctcctgggatgaagaaacgatcccagctattactgtgttgtacagaaacaccgtagcgttccattagctttaaagtcatctcaacgtaaggaatcgaaatcagtttatcgataatctcgatttctacatctcccagagccaaaggagctgc

SEQ ID NO: 2265 - DNA, 200 bp, Euphorbia heterophylla
ttctagattcacaaattcagaaagctattgaaaaaacgaaagctgaattatcgatcgattaggtcgcctggaaattcttatgttgaaggagatgcctcgagtgccagctactttctagccggagcagcaattaccggtggaactatcactgttgaaggttgtgggactagcagtttgcaggtaaatcacggaactttttc

SEQ ID NO: 2266 - DNA, 200 bp, Euphorbia heterophylla
gaaaaagttccgtgatttacctgcaaactgctagtcccacaaccttcaacagtgatagttccaccggtaattgctgctccggctagaaagtagctggcactcgaggcatctccttcaacataagaatttccaggcgacctaatcgatcgataattcagctttcgttttttcaatagctttctgaatttgtgaatctagaa

SEQ ID NO: 2267 - DNA, 200 bp, Euphorbia heterophylla
tgcaggtaaatcacggaactttttcgtattagacatttacattttcacatctgatgtaaattaatatgaaaatctagggagatgtgaaattcgccgaggttttggagaagatgggagctagagttacctggacggagaacagtgtaactgtgactggaccaccacgcgattctcctcgtcaaaaacacttgcgtgctatc

SEQ ID NO: 2268 - DNA, 200 bp, Euphorbia heterophylla
gatagcacgcaagtgtttttgacgaggagaatcgcgtggtggtccagtcacagttacactgttctccgtccaggtaactctagctcccatcttctccaaaacctcggcgaatttcacatctccctagattttcatattaatttacatcagatgtgaaaatgtaaatgtctaatacgaaaaagttccgtgatttacctgca

SEQ ID NO: 2269 - DNA, 200 bp, Euphorbia heterophylla
tcgtcaaaaacacttgcgtgctatcgatgtgaatatgaacaaaatgccagatgttgctatgacattagctgtggttgcacttttcgctgatggtcccactgccatcagagatggtaatttacgtttcttttcatgaattatgcttcgtattcttcaaataattcgaaaaggcagcctaacatttccatggataatgccga

SEQ ID NO: 2270 - DNA, 200 bp, Euphorbia heterophylla
tcggcattatccatggaaatgttaggctgccttttcgaattatttgaagaatacgaagcataattcatgaaaagaaacgtaaattaccatctctgatggcagtgggaccatcagcgaaaagtgcaaccacagctaatgtcatagcaacatctggcattttgttcatattcacatcgatagcacgcaagtgtttttgacga

SEQ ID NO: 2271 - DNA, 200 bp, Euphorbia heterophylla
ctaacatttccatggataatgccgaactgaattaccgaattttcgtaaaaaaatttaccgaactgaactgaatttcatctaataatcaaaattttcttaccaaaaatatttcggttatccgaacaaaactaaattaattaaaaaatgcaattgggtttttaataaaatggtttataaatgcaataaaaaaatattaatcc

SEQ ID NO: 2272 - DNA, 200 bp, Euphorbia heterophylla
ggattaatatttttttattgcatttataaaccattttattaaaaacccaattgcattttttaattaatttagttttgttcggataaccgaaatatttttggtaagaaaattttgattattagatgaaattcagttcagttcggtaaatttttttacgaaaattcggtaattcagttcggcattatccatggaaatgttag

SEQ ID NO: 2273 - DNA, 200 bp, Euphorbia heterophylla
aaatgcaataaaaaaatattaatccatcatgttgcgaaccaaacatattagttatcttataataattcaaccatacatataaaacaaatcagaatactattttaagaaaccgaattatccgaaccaaactatgaattatccgaactaaaatccgaaatatacgaaccgaattacataattcagttcggaaattcggataa

SEQ ID NO: 2274 - DNA, 200 bp, Euphorbia heterophylla
ttatccgaatttccgaactgaattatgtaattcggttcgtatatttcggattttagttcggataattcatagtttggttcggataattcggtttcttaaaatagtattctgatttgttttatatgtatggttgaattattataagataactaatatgtttggttcgcaacatgatggattaatatttttttattgcattt

SEQ ID NO: 2275 - DNA, 200 bp, Euphorbia heterophylla
taattcagttcggaaattcggataaacccgaattatgcactgctttaaatttaacaatgatttggctgtaaaatctaatgactcaaatgttactcggatcctaaaatacgaattccctttttttcctctcgatcttttacaagtgatacagacatacaagggaaagacggatcatttccttagatttcgtatgtttaaaa

SEQ ID NO: 2276 - DNA, 200 bp, Euphorbia heterophylla
ttttaaacatacgaaatctaaggaaatgatccgtctttcccttgtatgtctgtatcacttgtaaaagatcgagaggaaaaaaagggaattcgtattttaggatccgagtaacatttgagtcattagattttacagccaaatcattgttaaatttaaagcagtgcataattcgggtttatccgaatttccgaactgaatta

SEQ ID NO: 2277 - DNA, 200 bp, Euphorbia heterophylla
ttccttagatttcgtatgtttaaaacttttagactatttttgtttctgtttgacaatttgttcgctactctttatttccagtggcaagttggagagtgaaagaaaccgaaaggatgattgctgtttgcacagaacttaggaaggttagtttctgataaataaatttcactgggtttgaatatagtgaaacaaaattcgtc

SEQ ID NO: 2278 - DNA, 200 bp, Euphorbia heterophylla
gacgaattttgtttcactatattcaaacccagtgaaatttatttatcagaaactaaccttcctaagttctgtgcaaacagcaatcatcctttcggtttctttcactctccaacttgccactggaaataaagagtagcgaacaaattgtcaaacagaaacaaaaatagtctaaaagttttaaacatacgaaatctaaggaa

SEQ ID NO: 2279 - DNA, 200 bp, Euphorbia heterophylla
tgaatatagtgaaacaaaattcgtcggcttatcgattctaattataatattattgattgttggaatttcagttaggagcaacagttgaagaaggggaagattactgtgtgataactccacccgagaaactaaatataaccgagattgacacctatgatgatcacagaatggccatggctttctctcttgctgcctgtgga

SEQ ID NO: 2280 - DNA, 200 bp, Euphorbia heterophylla
tccacaggcagcaagagagaaagccatggccattctgtgatcatcataggtgtcaatctcggttatatttagtttctcgggtggagttatcacacagtaatcttccccttcttcaactgttgctcctaactgaaattccaacaatcaataatattataattagaatcgataagccgacgaattttgtttcactatattca

SEQ ID NO: 2281 - DNA, 200 bp, Euphorbia heterophylla
ggctttctctcttgctgcctgtggagaagttccggtcactattaaggatcctggatgcacccgaaaaactttcccggactattttgaagttctccataggtatactaagcaatgaacaaaaaacccgaaaaacttgacaattgatactaaagagagaattgttgctgtaaccattgaattctgataatttattcaagtga

SEQ ID NO: 2282 - DNA, 200 bp, Euphorbia heterophylla
tcacttgaataaattatcagaattcaatggttacagcaacaattctctctttagtatcaattgtcaagtttttcgggttttttgttcattgcttagtatacctatggagaacttcaaaatagtccgggaaagtttttcgggtgcatccaggatccttaatagtgaccggaacttctccacaggcagcaagagagaaagcc

SEQ ID NO: 2283 - DNA, 200 bp, Euphorbia heterophylla
gaattctgataatttattcaagtgagttgaaatttgttgatgtaccagactagctttttttctatctcaaatgttgggtgttattgtagacaatgtattctgaatgaattcgtttcgtaatcttcgagttaataagcaatgaaaggatgaatgttctatttaagcactgtttttttggctacgactcaatggagttcatt

SEQ ID NO: 2284 - DNA, 200 bp, Euphorbia heterophylla
aatgaactccattgagtcgtagccaaaaaaacagtgcttaaatagaacattcatcctttcattgcttattaactcgaagattacgaaacgaattcattcagaatacattgtctacaataacacccaacatttgagatagaaaaaaagctagtctggtacatcaacaaatttcaactcacttgaataaattatcagaattc

SEQ ID NO: 2285 - DNA, 200 bp, Euphorbia heterophylla
tggctacgactcaatggagttcatttcagttcaactatgtgtacaccaaaatatgttctattcagttcaattcagaaaattgcaataaaaaagaacattgccttaattaatacggaatataggcaaaacccacattgagccccttgccaactaaactttcaaatgttctttagctcccaactcggcactattgaccttcg

SEQ ID NO: 2286 - DNA, 200 bp, Euphorbia heterophylla
cgaaggtcaatagtgccgagttgggagctaaagaacatttgaaagtttagttggcaaggggctcaatgtgggttttgcctatattccgtattaattaaggcaatgttcttttttattgcaattttctgaattgaactgaatagaacatattttggtgtacacatagttgaactgaaatgaactccattgagtcgtagcca

SEQ ID NO: 2287 - DNA, 200 bp, Euphorbia heterophylla
cccaactcggcactattgaccttcgaggtccctcaagttgtggcacaaatgaatctccgagctccctcaagcttaaaattaggtatgtaagcttgagggagttaggtagttttaagcttgacgaaatttgaagggtcatttgtatcaaattgagggagctcggaaggtcatttgtgccaacttgaggggattgagagggt

SEQ ID NO: 2288 - DNA, 200 bp, Euphorbia heterophylla
accctctcaatcccctcaagttggcacaaatgaccttccgagctccctcaatttgatacaaatgacccttcaaatttcgtcaagcttaaaactacctaactccctcaagcttacatacctaattttaagcttgagggagctcggagattcatttgtgccacaacttgagggacctcgaaggtcaatagtgccgagttggg

SEQ ID NO: 2289 - DNA, 200 bp, Euphorbia heterophylla
gccaacttgaggggattgagagggtcaattgtgtcaagtttagggggttaggagtttcatccgaaagtttgggcaccttgagagttattttttatcattaatatttagtatattaattttaattgaccatgtaattgctaaaatctatatttttcgcccacgacctcgtaatttataaggccagcccagggtaaggtgta

SEQ ID NO: 2290 - DNA, 200 bp, Euphorbia heterophylla
tacaccttaccctgggctggccttataaattacgaggtcgtgggcgaaaaatatagattttagcaattacatggtcaattaaaattaatatactaaatattaatgataaaaaataactctcaaggtgcccaaactttcggatgaaactcctaaccccctaaacttgacacaattgaccctctcaatcccctcaagttggc

SEQ ID NO: 2291 - DNA, 200 bp, Euphorbia heterophylla
taaggccagcccagggtaaggtgtaaaagagttaatctaaaaatagaatcacattcttcgaaacccaatctcaatctaacattaaataatgaagcatgtaacatgttgcctttgtctatatgacataacattattgaggcatatcgccctcctcctatttatttttcttacactttctcacatggatgcctacctttggt

SEQ ID NO: 2292 - DNA, 200 bp, Euphorbia heterophylla
accaaaggtaggcatccatgtgagaaagtgtaagaaaaataaataggaggagggcgatatgcctcaataatgttatgtcatatagacaaaggcaacatgttacatgcttcattatttaatgttagattgagattgggtttcgaagaatgtgattctatttttagattaactcttttacaccttaccctgggctggcctta

SEQ ID NO: 2293 - DNA, 200 bp, Euphorbia heterophylla
tctcacatggatgcctacctttggttgttggatgtgtcttttatatatttccttcataatttacacattacaatattacattacatatcaatcaatctcttctaatatagtactttaagttgagaatattctcaactaaatgtgaataaaacaacaaataattgggttctttccatgctcactttgttaaaaacaaaatt

SEQ ID NO: 2294 - DNA, 200 bp, Euphorbia heterophylla
aattttgtttttaacaaagtgagcatggaaagaacccaattatttgttgttttattcacatttagttgagaatattctcaacttaaagtactatattagaagagattgattgatatgtaatgtaatattgtaatgtgtaaattatgaaggaaatatataaaagacacatccaacaaccaaaggtaggcatccatgtgaga

SEQ ID NO: 2295 - DNA, 200 bp, Euphorbia heterophylla
tgctcactttgttaaaaacaaaattatgattactttgcttcttatcaccatttgatcaatcaccccactacttattcaatagtgataaggacaaagttatagttacttaaagtaaccatagaatttccccaaataattgtatcaatagcgagactcaatagattaatgttgtatattatacaagtaaccattaaactagg

SEQ ID NO: 2296 - DNA, 200 bp, Euphorbia heterophylla
cctagtttaatggttacttgtataatatacaacattaatctattgagtctcgctattgatacaattatttggggaaattctatggttactttaagtaactataactttgtccttatcactattgaataagtagtggggtgattgatcaaatggtgataagaagcaaagtaatcataattttgtttttaacaaagtgagca

SEQ ID NO: 2297 - DNA, 200 bp, Euphorbia heterophylla
ttatacaagtaaccattaaactaggtttagtggtgacgacttcctctaaaagtggagaaagaagctgggatcctgaattcgagcctcatatttctcaaaatttaaatgtttctactacttaaaaaaatattattacaagctatattagttgagtactctaatttgctatacataaggtctaaaaatattagatctaacat

SEQ ID NO: 2298 - DNA, 200 bp, Euphorbia heterophylla
atgttagatctaatatttttagaccttatgtatagcaaattagagtactcaactaatatagcttgtaataatatttttttaagtagtagaaacatttaaattttgagaaatatgaggctcgaattcaggatcccagcttctttctccacttttagaggaagtcgtcaccactaaacctagtttaatggttacttgtataa

SEQ ID NO: 2299 - DNA, 200 bp, Euphorbia heterophylla
ggtctaaaaatattagatctaacattaatgtcgtatgcttgaagtatcaacactcactttatacattattcaatcacttgctgattattgaagatagagaagacactataagctattataaggaagaaaaaggaaaagggaaaagcaaataataaaaggaccaatcaaagacctagaaaaagctaaaaatagtgccaaaa

SEQ ID NO: 2300 - DNA, 200 bp, Euphorbia heterophylla
ttttggcactatttttagctttttctaggtctttgattggtccttttattatttgcttttcccttttcctttttcttccttataatagcttatagtgtcttctctatcttcaataatcagcaagtgattgaataatgtataaagtgagtgttgatacttcaagcatacgacattaatgttagatctaatatttttagacc

SEQ ID NO: 2301 - DNA, 200 bp, Euphorbia heterophylla
gaaaaagctaaaaatagtgccaaaacattgtagtatagatgcaaataaaaataattttactgttctatcttctgttctaagtaaagaagtaagctatttatatttattaattgtttaatttcactttcaggatatcttgtaattgaattattaagaacataggcattgagtttaagcaatcaattatataattaatgaac

SEQ ID NO: 2302 - DNA, 200 bp, Euphorbia heterophylla
gttcattaattatataattgattgcttaaactcaatgcctatgttcttaataattcaattacaagatatcctgaaagtgaaattaaacaattaataaatataaatagcttacttctttacttagaacagaagatagaacagtaaaattatttttatttgcatctatactacaatgttttggcactatttttagctttttc

SEQ ID NO: 2303 - DNA, 200 bp, Euphorbia heterophylla
gcaatcaattatataattaatgaacaataattctttttaagtgtgataagtggcttatttagtgtagataaatggacagcaaatccttttcaaagtcacttgcttatgtatgaaaatcttatattgtacactatataatgaaacctaccactaaagaagtgacacacacatattttaacctttatatatttttctatgat

SEQ ID NO: 2304 - DNA, 200 bp, Euphorbia heterophylla
atcatagaaaaatatataaaggttaaaatatgtgtgtgtcacttctttagtggtaggtttcattatatagtgtacaatataagattttcatacataagcaagtgactttgaaaaggatttgctgtccatttatctacactaaataagccacttatcacacttaaaaagaattattgttcattaattatataattgattgc

SEQ ID NO: 2305 - DNA, 200 bp, Euphorbia heterophylla
taacctttatatatttttctatgataattcaattataattccgactttcataaatatgaaaaatggtagtagtaatgacaaattgtcttaacttaaatgatcggaagctaaaattctaattaaggaaagttgaaaaccttaaatcaagaatcttggaaagcaaaaagtaaaataaaagtccaataataacccaatcccaa

SEQ ID NO: 2306 - DNA, 200 bp, Euphorbia heterophylla
ttgggattgggttattattggacttttattttactttttgctttccaagattcttgatttaaggttttcaactttccttaattagaattttagcttccgatcatttaagttaagacaatttgtcattactactaccatttttcatatttatgaaagtcggaattataattgaattatcatagaaaaatatataaaggtta

SEQ ID NO: 2307 - DNA, 200 bp, Euphorbia heterophylla
aagtccaataataacccaatcccaaaatatatctcacacacttccaaggtgtgaaaataactaatggtcccaatactaaaattaagttagattttcactatataaagtatgtaatcctcaaagtaaggatttgattggccaaaattcatggtctctcataccaatctaatcaaatttaaagacatttttgacatttaatc

SEQ ID NO: 2308 - DNA, 200 bp, Euphorbia heterophylla
gattaaatgtcaaaaatgtctttaaatttgattagattggtatgagagaccatgaattttggccaatcaaatccttactttgaggattacatactttatatagtgaaaatctaacttaattttagtattgggaccattagttattttcacaccttggaagtgtgtgagatatattttgggattgggttattattggactt

SEQ ID NO: 2309 - DNA, 200 bp, Euphorbia heterophylla
ttaaagacatttttgacatttaatcaatcatattgcaaaaaaaaaaaaaaaactaaaccaatacacctcccattattgcaagtgtttttttaaaaaaaggtggcatttttccctcttcctaatactattaatgccttttgtttatcaatttagtgttactcctaaattaagtagttaacctaattaattacccacaattt

SEQ ID NO: 2310 - DNA, 200 bp, Euphorbia heterophylla
aaattgtgggtaattaattaggttaactacttaatttaggagtaacactaaattgataaacaaaaggcattaatagtattaggaagagggaaaaatgccacctttttttaaaaaaacacttgcaataatgggaggtgtattggtttagttttttttttttttttgcaatatgattgattaaatgtcaaaaatgtctttaa

SEQ ID NO: 2311 - DNA, 200 bp, Euphorbia heterophylla
taacctaattaattacccacaatttcctattcctatctttcatagccccttctccacatcatttgctaaacaaaagaaaaaaaaaacctgtcagcttttatatttttatatgaactagtgtagtgcccgtgcgatgcacggataaattttaaaaaatatattatattgcaacataaaacaaaaatatgttatatcgtgta

SEQ ID NO: 2312 - DNA, 200 bp, Euphorbia heterophylla
tacacgatataacatatttttgttttatgttgcaatataatatattttttaaaatttatccgtgcatcgcacgggcactacactagttcatataaaaatataaaagctgacaggttttttttttcttttgtttagcaaatgatgtggagaaggggctatgaaagataggaataggaaattgtgggtaattaattaggtta

SEQ ID NO: 2313 - DNA, 200 bp, Euphorbia heterophylla
aaacaaaaatatgttatatcgtgtattgaattaaattgtgaaaaacctttttatatacaacatttgcagattcatctattaattgttcattatcgttaagagaaaagggcatgatatcatataaatccgtcttcaattacaccataagtgggttgatatcattaatcatattattttttcacttcaaaatatgaaagata

SEQ ID NO: 2314 - DNA, 200 bp, Euphorbia heterophylla
tatctttcatattttgaagtgaaaaaataatatgattaatgatatcaacccacttatggtgtaattgaagacggatttatatgatatcatgcccttttctcttaacgataatgaacaattaatagatgaatctgcaaatgttgtatataaaaaggtttttcacaatttaattcaatacacgatataacatatttttgttt

SEQ ID NO: 2315 - DNA, 200 bp, Euphorbia heterophylla
ttttcacttcaaaatatgaaagatataaatttctacaattaccatatgctttcccatcaaaatttgatgaggggaaaagagacaattattcttaaataagaaggaataattattgctaaaaattttaaaaatttaatcttaaatagaattgtaaccaacataattaaataaaataagaataacaaattaaattttataat

SEQ ID NO: 2316 - DNA, 200 bp, Euphorbia heterophylla
attataaaatttaatttgttattcttattttatttaattatgttggttacaattctatttaagattaaatttttaaaatttttagcaataattattccttcttatttaagaataattgtctcttttcccctcatcaaattttgatgggaaagcatatggtaattgtagaaatttatatctttcatattttgaagtgaaaa

SEQ ID NO: 2317 - DNA, 200 bp, Euphorbia heterophylla
agaataacaaattaaattttataatagattttagaattataatgagattttgatttgtttccatgattcaccctaattaattattttcccataaaaataattattgatattaatcattatcatttttctaaataaatctattttagaaatatattaaaatcaatttcctaaaattcatgaaaaataccaatttctttatt

SEQ ID NO: 2318 - DNA, 200 bp, Euphorbia heterophylla
aataaagaaattggtatttttcatgaattttaggaaattgattttaatatatttctaaaatagatttatttagaaaaatgataatgattaatatcaataattatttttatgggaaaataattaattagggtgaatcatggaaacaaatcaaaatctcattataattctaaaatctattataaaatttaatttgttattct

SEQ ID NO: 2319 - DNA, 200 bp, Euphorbia heterophylla
attcgtgctgccattaaggaggctaaggctgtaaaagacaagcccactatgatcaaggtgaaatgatgcctctcttacagtgtgtttatatatagatataaacaatagaagtttttaaatggtgtttgtacttgcttgcaggtcactacaacaattggttatggatcgccaaacaaggcaaactcatacagtgtacatgg

SEQ ID NO: 2320 - DNA, 200 bp, Euphorbia heterophylla
ccatgtacactgtatgagtttgccttgtttggcgatccataaccaattgttgtagtgacctgcaagcaagtacaaacaccatttaaaaacttctattgtttatatctatatataaacacactgtaagagaggcatcatttcaccttgatcatagtgggcttgtcttttacagccttagcctccttaatggcagcacgaat

SEQ ID NO: 2321 - DNA, 200 bp, Euphorbia heterophylla
aggcaaactcatacagtgtacatggaagtgcacttggtgccaaggaagttgatgctacgagggcgaacctaggatggccctatgagcctttccatgttccagaggatgttaagaagtaagccgacactactagctaggtttccgtctgttttttttaccgattttgatttgactttgatgactcttgtttcaggcactgg

SEQ ID NO: 2322 - DNA, 200 bp, Euphorbia heterophylla
ccagtgcctgaaacaagagtcatcaaagtcaaatcaaaatcggtaaaaaaaacagacggaaacctagctagtagtgtcggcttacttcttaacatcctctggaacatggaaaggctcatagggccatcctaggttcgccctcgtagcatcaacttccttggcaccaagtgcacttccatgtacactgtatgagtttgcct

SEQ ID NO: 2323 - DNA, 200 bp, Euphorbia heterophylla
tgatgactcttgtttcaggcactggagtcgccatgctgcagagggagcttcttatgaagctgaatggaacgctaagtttgccgagtacgagaagaaatacaaggaggaagctgcagagttcaagtccatcatcacgggtgaattaccggctggctgggagaaagcacttccagtgagtatctgcttcatatttcttgccc

SEQ ID NO: 2324 - DNA, 200 bp, Euphorbia heterophylla
gggcaagaaatatgaagcagatactcactggaagtgctttctcccagccagccggtaattcacccgtgatgatggacttgaactctgcagcttcctccttgtatttcttctcgtactcggcaaacttagcgttccattcagcttcataagaagctccctctgcagcatggcgactccagtgcctgaaacaagagtcatca

SEQ ID NO: 2325 - DNA, 200 bp, Euphorbia heterophylla
agtatctgcttcatatttcttgccccttttatcttttaggtggcgtttgggtctcggaattcctattccgtggaatagaaatagaagtgtgtggaaagatgtcaaatatagaagagaattctagacgcatggaaaagcttttccaagtttgtatacatctcatggaaaagctattcctttgtttcaaaaaggagtagctt

SEQ ID NO: 2326 - DNA, 200 bp, Euphorbia heterophylla
aagctactcctttttgaaacaaaggaatagcttttccatgagatgtatacaaacttggaaaagcttttccatgcgtctagaattctcttctatatttgacatctttccacacacttctatttctattccacggaataggaattccgagacccaaacgccacctaaaagataaaaggggcaagaaatatgaagcagatact

SEQ ID NO: 2327 - DNA, 200 bp, Euphorbia heterophylla
cctttgtttcaaaaaggagtagcttttccttgagatgtatataaactaggaaaagcttttccatgcgtcaatggattctagatgattaatgtgtcatatttgacatctttccatgcatttttacttctattccatggaataggatttctgctaaccaaacgagcccttagagttattacttagtgaatttccacttgcat

SEQ ID NO: 2328 - DNA, 200 bp, Euphorbia heterophylla
atgcaagtggaaattcactaagtaataactctaagggctcgtttggttagcagaaatcctattccatggaatagaagtaaaaatgcatggaaagatgtcaaatatgacacattaatcatctagaatccattgacgcatggaaaagcttttcctagtttatatacatctcaaggaaaagctactcctttttgaaacaaagg

SEQ ID NO: 2329 - DNA, 200 bp, Euphorbia heterophylla
ttacttagtgaatttccacttgcattatctgaaaacagacatctcatattttctttgtcaagctttatgagcgtgtttggcatcaatgtttggcatgaaatttaactcaattcaaattattttatacctaagattgtaaatatgaaatgaattctttcaaaacaagatttccaacacaccccatgactaatttctccata

SEQ ID NO: 2330 - DNA, 200 bp, Euphorbia heterophylla
tatggagaaattagtcatggggtgtgttggaaatcttgttttgaaagaattcatttcatatttacaatcttaggtataaaataatttgaattgagttaaatttcatgccaaacattgatgccaaacacgctcataaagcttgacaaagaaaatatgagatgtctgttttcagataatgcaagtggaaattcactaagtaa

SEQ ID NO: 2331 - DNA, 200 bp, Euphorbia heterophylla
acaccccatgactaatttctccatatgtttgacctcatgcataatttggaaccaatcacttcagacaacccgatacacattcttaagagttaggacaaaacgaacattggattttcagacttgataatctcttaatccttcactattgaaatttttacagacatacaccccagagaccccagcagatgccaccagaaatc

SEQ ID NO: 2332 - DNA, 200 bp, Euphorbia heterophylla
gatttctggtggcatctgctggggtctctggggtgtatgtctgtaaaaatttcaatagtgaaggattaagagattatcaagtctgaaaatccaatgttcgttttgtcctaactcttaagaatgtgtatcgggttgtctgaagtgattggttccaaattatgcatgaggtcaaacatatggagaaattagtcatggggtgt

SEQ ID NO: 2333 - DNA, 200 bp, Euphorbia heterophylla
accccagcagatgccaccagaaatctatcacaagccaatctaaacgcacttgccaaagtgctccccggtctcatcggtggcagtgcagatcttgcctcatcaaacatgaccttgctgaaaatgttcggcgacttccaaaaagacactccagaagaaagaaacgtccggttcggtgtcagggagcatgcaatgggcgccat

SEQ ID NO: 2334 - DNA, 200 bp, Euphorbia heterophylla
atggcgcccattgcatgctccctgacaccgaaccggacgtttctttcttctggagtgtctttttggaagtcgccgaacattttcagcaaggtcatgtttgatgaggcaagatctgcactgccaccgatgagaccggggagcactttggcaagtgcgtttagattggcttgtgatagatttctggtggcatctgctggggt

SEQ ID NO: 2335 - DNA, 200 bp, Euphorbia heterophylla
tcagggagcatgcaatgggcgccatctgcaatggcatagctctccatagccccggctttatcccctactgtgcaactttcttcgttttcaccgactacatgagagccgccatgaggatctccgccttgtgtgaggccggcgtaatttacgtcatgacccacgactccatcggtctcggagaagacgggcccacccaccag

SEQ ID NO: 2336 - DNA, 200 bp, Euphorbia heterophylla
ctggtgggtgggcccgtcttctccgagaccgatggagtcgtgggtcatgacgtaaattacgccggcctcacacaaggcggagatcctcatggcggctctcatgtagtcggtgaaaacgaagaaagttgcacagtaggggataaagccggggctatggagagctatgccattgcagatggcgcccattgcatgctccctga

SEQ ID NO: 2337 - DNA, 200 bp, Euphorbia heterophylla
cggagaagacgggcccacccaccagccgatcgaacacctggcaagcttccgtgcgatgcccaacatcttgatgctccgaccggccgacggaaacgaaactgccggttcgtacaaggttgctgtccaaaaccggaagagaccctcggtcctcgcactttctcgacaaaagctgccgaatctcgcgggaacctcgattgagg

SEQ ID NO: 2338 - DNA, 200 bp, Euphorbia heterophylla
cctcaatcgaggttcccgcgagattcggcagcttttgtcgagaaagtgcgaggaccgagggtctcttccggttttggacagcaaccttgtacgaaccggcagtttcgtttccgtcggccggtcggagcatcaagatgttgggcatcgcacggaagcttgccaggtgttcgatcggctggtgggtgggcccgtcttctccg

SEQ ID NO: 2339 - DNA, 200 bp, Euphorbia heterophylla
aatctcgcgggaacctcgattgagggggttgaaaagggcgggtatacaatttcagataattcgaccgggaataagcctgatgtgattttgattgcgaccggttcggagttggagattgcggctaaggccggggatgagcttaggaaggagggcaaggcggtgagggtcgtgtcgtttgtgtcgtgggagttgtttgagga

SEQ ID NO: 2340 - DNA, 200 bp, Euphorbia heterophylla
tcctcaaacaactcccacgacacaaacgacacgaccctcaccgccttgccctccttcctaagctcatccccggccttagccgcaatctccaactccgaaccggtcgcaatcaaaatcacatcaggcttattcccggtcgaattatctgaaattgtatacccgcccttttcaaccccctcaatcgaggttcccgcgagatt

SEQ ID NO: 2341 - DNA, 200 bp, Euphorbia heterophylla
ttgtgtcgtgggagttgtttgaggagcagtcggatgagtacaaggaaagtgttttgccggcggatgtgactgctagggttagcattgaggctggttcgacatttgggtggcacaagattgtgggaagcaaagggaaggcgattgggattgaccactttggagcaagtgcgccggctgggaaaatatacaaggagttcggt

SEQ ID NO: 2342 - DNA, 200 bp, Euphorbia heterophylla
accgaactccttgtatattttcccagccggcgcacttgctccaaagtggtcaatcccaatcgccttccctttgcttcccacaatcttgtgccacccaaatgtcgaaccagcctcaatgctaaccctagcagtcacatccgccggcaaaacactttccttgtactcatccgactgctcctcaaacaactcccacgacacaa

SEQ ID NO: 2343 - DNA, 200 bp, Euphorbia heterophylla
tgggaaaatatacaaggagttcggtattacggctgaggcggttgttgctgctgccaaagaaatttcttagactgaagagcgagagtttggcgaaatgggtacccgaagagcgagagttttaccacgacttggtctctgttaaaataataaggtaaaaatatcaaggttaggtttttcttgtgatgaaatgggcaaggcag

SEQ ID NO: 2344 - DNA, 200 bp, Euphorbia heterophylla
ctgccttgcccatttcatcacaagaaaaacctaaccttgatatttttaccttattattttaacagagaccaagtcgtggtaaaactctcgctcttcgggtacccatttcgccaaactctcgctcttcagtctaagaaatttctttggcagcagcaacaaccgcctcagccgtaataccgaactccttgtatattttccca

SEQ ID NO: 2345 - DNA, 200 bp, Euphorbia heterophylla
tcttgtgatgaaatgggcaaggcagtccagaaaaagaggagggtttgattatgaacattgtgggctttgtaactgctcttgacttaagttgagtttttgtgtttttacttgtagctagtgaggttgacagttatttcatactgcgttttaatttattgagaagcaattgagtctcttttcttttgtctatttgacataag

SEQ ID NO: 2346 - DNA, 200 bp, Euphorbia heterophylla
cttatgtcaaatagacaaaagaaaagagactcaattgcttctcaataaattaaaacgcagtatgaaataactgtcaacctcactagctacaagtaaaaacacaaaaactcaacttaagtcaagagcagttacaaagcccacaatgttcataatcaaaccctcctctttttctggactgccttgcccatttcatcacaaga

SEQ ID NO: 2347 - DNA, 200 bp, Euphorbia heterophylla
ttttcttttgtctatttgacataagttatttctacttctaatatctgctaaccaccttgttagtagcagtagggttgagcattttgttatgccgagcctattaggctgcactgaattatcgaatattgattggagcattcggttatgaaagttcagtattatgtgaaactattcagttcggtacaaccgatcgctctact

SEQ ID NO: 2348 - DNA, 200 bp, Euphorbia heterophylla
agtagagcgatcggttgtaccgaactgaatagtttcacataatactgaactttcataaccgaatgctccaatcaatattcgataattcagtgcagcctaataggctcggcataacaaaatgctcaaccctactgctactaacaaggtggttagcagatattagaagtagaaataacttatgtcaaatagacaaaagaaaa

SEQ ID NO: 2349 - DNA, 200 bp, Euphorbia heterophylla
gttcggtacaaccgatcgctctactctaagtagcagactggttttcggatatactcgataaaattgataatctgatctaagcctttaaagttacttccgattttcaatttttgagagccgaattgaagtttgccgaatttaattggattgaacttaactgaagtatgctaaattaaactacatagaagtgacttgaactt

SEQ ID NO: 2350 - DNA, 200 bp, Euphorbia heterophylla
aagttcaagtcacttctatgtagtttaatttagcatacttcagttaagttcaatccaattaaattcggcaaacttcaattcggctctcaaaaattgaaaatcggaagtaactttaaaggcttagatcagattatcaattttatcgagtatatccgaaaaccagtctgctacttagagtagagcgatcggttgtaccgaac

SEQ ID NO: 2351 - DNA, 200 bp, Euphorbia heterophylla
aactacatagaagtgacttgaacttagttgaacttacattattgaattgaaatgaaggaatggaatgatctgaattgtagttaaagagaagtaaaatgttgcatcaattggacccaccgcatatagtaggaaaagggtgagcaagtggatggagatatggtgaaatgttagcctaaatggggatttttggggtgggtgag

SEQ ID NO: 2352 - DNA, 200 bp, Euphorbia heterophylla
ctcacccaccccaaaaatccccatttaggctaacatttcaccatatctccatccacttgctcacccttttcctactatatgcggtgggtccaattgatgcaacattttacttctctttaactacaattcagatcattccattccttcatttcaattcaataatgtaagttcaactaagttcaagtcacttctatgtagtt

SEQ ID NO: 2353 - DNA, 200 bp, Euphorbia heterophylla
aatggggatttttggggtgggtgaggttgttgatcaatcaagccccacctatccatgcatgtcctctcgctggttttgaagctataaatcataattggccttcatttgatgatgcaaggaataacgaattttggcatattcttacacctaactccaccatattcaaagtagctaataaatttcatgaaaaataaatccat

SEQ ID NO: 2354 - DNA, 200 bp, Euphorbia heterophylla
atggatttatttttcatgaaatttattagctactttgaatatggtggagttaggtgtaagaatatgccaaaattcgttattccttgcatcatcaaatgaaggccaattatgatttatagcttcaaaaccagcgagaggacatgcatggataggtggggcttgattgatcaacaacctcacccaccccaaaaatccccatt

SEQ ID NO: 2355 - DNA, 200 bp, Euphorbia heterophylla
taaatttcatgaaaaataaatccatgaaaaagtgtggtcagagacaactttttaggaattcaattcattttatatgtaaatttttaaattttttatataaaataatttcaaaagaaattaatcgaattcttttgaaaaagaatgatttcaagcacatgagaattattttatccacaatattgtatcagtaaattttctct

SEQ ID NO: 2356 - DNA, 200 bp, Euphorbia heterophylla
agagaaaatttactgatacaatattgtggataaaataattctcatgtgcttgaaatcattctttttcaaaagaattcgattaatttcttttgaaattattttatataaaaaatttaaaaatttacatataaaatgaattgaattcctaaaaagttgtctctgaccacactttttcatggatttatttttcatgaaattta

SEQ ID NO: 2357 - DNA, 200 bp, Euphorbia heterophylla
aatattgtatcagtaaattttctcttaaattgataaaaaaaatagtgttaactgccattcggttatacttacaattgtctctttcaattactactatgcacgtaatttaaaaacaaaagtagaactttatttctatgccttattgccaaaatactcaggccataggctagtcattttgcagaaacgtttgcaccagtgca

SEQ ID NO: 2358 - DNA, 200 bp, Euphorbia heterophylla
tgcactggtgcaaacgtttctgcaaaatgactagcctatggcctgagtattttggcaataaggcatagaaataaagttctacttttgtttttaaattacgtgcatagtagtaattgaaagagacaattgtaagtataaccgaatggcagttaacactattttttttatcaatttaagagaaaatttactgatacaatatt

SEQ ID NO: 2359 - DNA, 200 bp, Euphorbia heterophylla
ttgcagaaacgtttgcaccagtgcacaaacaatcgggcaaaatgtatggccagttagttgcctcagcattttggcaaatcggcaagttgtatttacatttttcaatagaaacgtataaaaaattttggaattcgaaaagatgtccattggtttccttagatgcatttttaaagctaatctagttatttcgaaggtatata

SEQ ID NO: 2360 - DNA, 200 bp, Euphorbia heterophylla
tatataccttcgaaataactagattagctttaaaaatgcatctaaggaaaccaatggacatcttttcgaattccaaaattttttatacgtttctattgaaaaatgtaaatacaacttgccgatttgccaaaatgctgaggcaactaactggccatacattttgcccgattgtttgtgcactggtgcaaacgtttctgcaa

SEQ ID NO: 2361 - DNA, 200 bp, Euphorbia heterophylla
aatctagttatttcgaaggtatatacttcttcttctatatttacaatttcatattatatagtttctgtaattatagtgatattagaagaagggctaaaaggctttaccaacacaacctttttggtttggtcttcattcaaaagcccattccacaatcttcattttatgtccccacaaaacctacttctctctcaccaaac

SEQ ID NO: 2362 - DNA, 200 bp, Euphorbia heterophylla
gtttggtgagagagaagtaggttttgtggggacataaaatgaagattgtggaatgggcttttgaatgaagaccaaaccaaaaaggttgtgttggtaaagccttttagcccttcttctaatatcactataattacagaaactatataatatgaaattgtaaatatagaagaagaagtatataccttcgaaataactagatt

SEQ ID NO: 2363 - DNA, 200 bp, Euphorbia heterophylla
aaaacctacttctctctcaccaaacctacctattataatgaccaaaatactgatttggcaatacctaattggtaagttgcaaatcataacaataaaatcgacttcacactatcaaaaccttcgttaactaccacgtcccacagtgtttggtatagacgccacattctcagtctcaccaaccccctttcttttcagtcctt

SEQ ID NO: 2364 - DNA, 200 bp, Euphorbia heterophylla
aaggactgaaaagaaagggggttggtgagactgagaatgtggcgtctataccaaacactgtgggacgtggtagttaacgaaggttttgatagtgtgaagtcgattttattgttatgatttgcaacttaccaattaggtattgccaaatcagtattttggtcattataataggtaggtttggtgagagagaagtaggtttt

SEQ ID NO: 2365 - DNA, 200 bp, Euphorbia heterophylla
ccaaccccctttcttttcagtccttcaaattcacaacattccaatttagcccacaaaattttattttctgtgcctccaattctattatacacaatcccctaacttaactttttatcactaaaaatcaaataaagttgatgggtcaatttcgaaaattgatgaaatatgaggttggtaggaagattgaaataccctcaatt

SEQ ID NO: 2366 - DNA, 200 bp, Euphorbia heterophylla
aattgagggtatttcaatcttcctaccaacctcatatttcatcaattttcgaaattgacccatcaactttatttgatttttagtgataaaaagttaagttaggggattgtgtataatagaattggaggcacagaaaataaaattttgtgggctaaattggaatgttgtgaatttgaaggactgaaaagaaagggggttgg

SEQ ID NO: 2367 - DNA, 200 bp, Euphorbia heterophylla
taggaagattgaaataccctcaattgatttgaatacaaccaactcctaattacaactaaaccctcaccaatctcaaatcaacgcacccatttctcttcttccccattgagaattcaagacctccatagggatcagagagttgcagagaacttgatagccctacttgaatggctcaagttagcaaattctgcaatggagtt

SEQ ID NO: 2368 - DNA, 200 bp, Euphorbia heterophylla
aactccattgcagaatttgctaacttgagccattcaagtagggctatcaagttctctgcaactctctgatccctatggaggtcttgaattctcaatggggaagaagagaaatgggtgcgttgatttgagattggtgagggtttagttgtaattaggagttggttgtattcaaatcaattgagggtatttcaatcttccta

SEQ ID NO: 2369 - DNA, 200 bp, Euphorbia heterophylla
agttagcaaattctgcaatggagttcaaaagacctacactttccccaatttttctaaaccggaaacccccaaatctatgccttcattttcaatcaggtcaaggcttaatgggtcgccggtttcattggctgtaaatcggagaaggggcggctgtattgttgctaaaggtaaaggtagttcttttcaagtttcggcttcag

SEQ ID NO: 2370 - DNA, 200 bp, Euphorbia heterophylla
ctgaagccgaaacttgaaaagaactacctttacctttagcaacaatacagccgccccttctccgatttacagccaatgaaaccggcgacccattaagccttgacctgattgaaaatgaaggcatagatttgggggtttccggtttagaaaaattggggaaagtgtaggtcttttgaactccattgcagaatttgctaact

SEQ ID NO: 2371 - DNA, 200 bp, Euphorbia heterophylla
agttcttttcaagtttcggcttcagtagccacaacagagaaaccctcgactgcgccggaaatagttttgcagccaatcaaagaaatctccggcaccgtcactttgcctggttcaaaatcgctgtccaatcggattcttctacttgctgctttatctgaggtatgaattgctctggtttttccggcaacagcattatgtgc

SEQ ID NO: 2372 - DNA, 200 bp, Euphorbia heterophylla
gcacataatgctgttgccggaaaaaccagagcaattcatacctcagataaagcagcaagtagaagaatccgattggacagcgattttgaaccaggcaaagtgacggtgccggagatttctttgattggctgcaaaactatttccggcgcagtcgagggtttctctgttgtggctactgaagccgaaacttgaaaagaact

SEQ ID NO: 2373 - DNA, 200 bp, Euphorbia heterophylla
tttttccggcaacagcattatgtgcctttgaattgtaagctgaggagatttcattgttgtcatcattataattggtgcttccttcttgtttgttagaaacttagttgaaaggcaaacgaaattaggatcacatagattactaactgtcaatagtctatttaaattgttgttatcgatcgttcagggcacaactgttgttg

SEQ ID NO: 2374 - DNA, 200 bp, Euphorbia heterophylla
caacaacagttgtgccctgaacgatcgataacaacaatttaaatagactattgacagttagtaatctatgtgatcctaatttcgtttgcctttcaactaagtttctaacaaacaagaaggaagcaccaattataatgatgacaacaatgaaatctcctcagcttacaattcaaaggcacataatgctgttgccggaaaaa

SEQ ID NO: 2375 - DNA, 200 bp, Euphorbia heterophylla
atcgttcagggcacaactgttgttgacaacttgctgaatagtgacgatgttcattatatgctgggcgcacttaaaacactgggactacgagtggaagacaacagtgaaattaaacaagctattgtggaaggttgtggaggtcagttccctgtgggtaaagaatcaaagaaggacattcaactttttctcggaaatgccgg

SEQ ID NO: 2376 - DNA, 200 bp, Euphorbia heterophylla
ccggcatttccgagaaaaagttgaatgtccttctttgattctttacccacagggaactgacctccacaaccttccacaatagcttgtttaatttcactgttgtcttccactcgtagtcccagtgttttaagtgcgcccagcatataatgaacatcgtcactattcagcaagttgtcaacaacagttgtgccctgaacgat

SEQ ID NO: 2377 - DNA, 200 bp, Euphorbia heterophylla
ttcaactttttctcggaaatgccgggacagcaatgcgccctttgactgctgcagttactgcagccggtggaaattcaaggtcttttaccttccccctttttacccttgcagaattattggacttgtatttttgagactctatatggttttaatcagagtatgtggtttaggatttataagcttgtcttatacgcactcag

SEQ ID NO: 2378 - DNA, 200 bp, Euphorbia heterophylla
ctgagtgcgtataagacaagcttataaatcctaaaccacatactctgattaaaaccatatagagtctcaaaaatacaagtccaataattctgcaagggtaaaaagggggaaggtaaaagaccttgaatttccaccggctgcagtaactgcagcagtcaaagggcgcattgctgtcccggcatttccgagaaaaagttgaa

SEQ ID NO: 2379 - DNA, 200 bp, Euphorbia heterophylla
ataagcttgtcttatacgcactcagtatgacctaatcaggtttaacagctagatggaatcaaattgtttcctctattttgtaattcatatggtttgcattttcgtctgaaatgggatttgggtacaaagcctgaatgagaaattttgatcgttaatttgaatgaagtggctgctttatctgggcattagatgctgaaatt

SEQ ID NO: 2380 - DNA, 200 bp, Euphorbia heterophylla
aatttcagcatctaatgcccagataaagcagccacttcattcaaattaacgatcaaaatttctcattcaggctttgtacccaaatcccatttcagacgaaaatgcaaaccatatgaattacaaaatagaggaaacaatttgattccatctagctgttaaacctgattaggtcatactgagtgcgtataagacaagcttat

SEQ ID NO: 2381 - DNA, 200 bp, Euphorbia heterophylla
attttccccaattttcctaaacccgaaacccccaaatccgttccttcgttttcaatcaggtcaagttttaacgggtcgccggtgtcattcggtctaaatcggcgccggacaaagggcgacagtattgtaatcaaaggtaaagctagttcgtttaaagtttcagcttcagtagccacagcagagaaaccctctacttcacc

SEQ ID NO: 2382 - DNA, 200 bp, Euphorbia heterophylla
ggtgaagtagagggtttctctgctgtggctactgaagctgaaactttaaacgaactagctttacctttgattacaatactgtcgccctttgtccggcgccgatttagaccgaatgacaccggcgacccgttaaaacttgacctgattgaaaacgaaggaacggatttgggggtttcgggtttaggaaaattggggaaaat

SEQ ID NO: 2383 - DNA, 200 bp, Euphorbia heterophylla
cagcagagaaaccctctacttcaccggagatagtgttgcaaccaattaaagaaatctccggcaccgtcactttgccgggttccaagtcgctgtccaatcggattcttctccttgctgctttatccgaggtatgaattgttcagaaattttcggctattgcattctgtgccgtttaattgtaagctgagctttcgttattg

SEQ ID NO: 2384 - DNA, 200 bp, Euphorbia heterophylla
caataacgaaagctcagcttacaattaaacggcacagaatgcaatagccgaaaatttctgaacaattcatacctcggataaagcagcaaggagaagaatccgattggacagcgacttggaacccggcaaagtgacggtgccggagatttctttaattggttgcaacactatctccggtgaagtagagggtttctctgctg

SEQ ID NO: 2385 - DNA, 200 bp, Euphorbia heterophylla
attgtaagctgagctttcgttattgtcatgattgcattgaccttttgattttcttctatagctggttatagatatcagatttagcttaattatgtaaagtttatgctaattttttttgaattaaacttcaaattttgagctataacttatcttttagttcatgtgtttcccttgttccctatctgaagactttttttttg

SEQ ID NO: 2386 - DNA, 200 bp, Euphorbia heterophylla
caaaaaaaaagtcttcagatagggaacaagggaaacacatgaactaaaagataagttatagctcaaaatttgaagtttaattcaaaaaaaattagcataaactttacataattaagctaaatctgatatctataaccagctatagaagaaaatcaaaaggtcaatgcaatcatgacaataacgaaagctcagcttacaat

SEQ ID NO: 2387 - DNA, 200 bp, Euphorbia heterophylla
tccctatctgaagactttttttttgcaacgataacttcataatatggcctccatagctctgtaaagtagtgattttgagcgttttttgcttgaatattttgcttctcgtagaatgttgactaatagaacggtgcgtaaaatggtttttacatctattgttcagggcacaactgttgtggacaacttactaaacagcgatg

SEQ ID NO: 2388 - DNA, 200 bp, Euphorbia heterophylla
catcgctgtttagtaagttgtccacaacagttgtgccctgaacaatagatgtaaaaaccattttacgcaccgttctattagtcaacattctacgagaagcaaaatattcaagcaaaaaacgctcaaaatcactactttacagagctatggaggccatattatgaagttatcgttgcaaaaaaaaagtcttcagataggga

SEQ ID NO: 2389 - DNA, 200 bp, Euphorbia heterophylla
gtggacaacttactaaacagcgatgatgttcattacatgcttggtgcacttaaaacactcggactacgagtggaacacaatagtgaactcaaacaagctattgtagaaggttgtggaggtcaattcccagtgggtaaagagtcaaagaaagatgtcgaactttttctcggaaatgcaggaactgcaatgcgtccattgac

SEQ ID NO: 2390 - DNA, 200 bp, Euphorbia heterophylla
gtcaatggacgcattgcagttcctgcatttccgagaaaaagttcgacatctttctttgactctttacccactgggaattgacctccacaaccttctacaatagcttgtttgagttcactattgtgttccactcgtagtccgagtgttttaagtgcaccaagcatgtaatgaacatcatcgctgtttagtaagttgtccac

SEQ ID NO: 2391 - DNA, 200 bp, Euphorbia heterophylla
caggaactgcaatgcgtccattgacagctgcagttactgcagccggtggaaattctaggtctttttttactccctttcttaccctctttatataacccttgctttacaaaacaatcacacttcttttccacgacttatgaggttctatatggtttaacatgtatctaatgtgcttcagctacatacttgatggggttcca

SEQ ID NO: 2392 - DNA, 200 bp, Euphorbia heterophylla
tggaaccccatcaagtatgtagctgaagcacattagatacatgttaaaccatatagaacctcataagtcgtggaaaagaagtgtgattgttttgtaaagcaagggttatataaagagggtaagaaagggagtaaaaaaagacctagaatttccaccggctgcagtaactgcagctgtcaatggacgcattgcagttcctg

SEQ ID NO: 2393 - DNA, 200 bp, Euphorbia heterophylla
cagctacatacttgatggggttccaagaatgagggagagaccaatcggggatttggtaaccggtttgaagcagcttggtgctgatgtcacttgctcttccacaaattgcccacctgttcatgtcaatgcaaatggcggcctacccgggggaaaggtatggtactgttgtcacgaaaagttccacttgcaaacttttataa

SEQ ID NO: 2394 - DNA, 200 bp, Euphorbia heterophylla
ttataaaagtttgcaagtggaacttttcgtgacaacagtaccatacctttcccccgggtaggccgccatttgcattgacatgaacaggtgggcaatttgtggaagagcaagtgacatcagcaccaagctgcttcaaaccggttaccaaatccccgattggtctctccctcattcttggaaccccatcaagtatgtagctg

SEQ ID NO: 2395 - DNA, 200 bp, Euphorbia heterophylla
aagttccacttgcaaacttttataagaacaaaatattttgacattagagaaatgattttgactatctgtctgctattaatttccgggtaaataattataacctccctcaagtttgacataatacgctactacctcattgggttttaaaaacctaatatatacctccctatgttttatattttctaattactatctcccta

SEQ ID NO: 2396 - DNA, 200 bp, Euphorbia heterophylla
tagggagatagtaattagaaaatataaaacatagggaggtatatattaggtttttaaaacccaatgaggtagtagcgtattatgtcaaacttgagggaggttataattatttacccggaaattaatagcagacagatagtcaaaatcatttctctaatgtcaaaatattttgttcttataaaagtttgcaagtggaactt

SEQ ID NO: 2397 - DNA, 200 bp, Euphorbia heterophylla
atattttctaattactatctccctatactttacttttattatattgttaggcccctttataggttattatgtcattattatatggaaaattaaccaaaatatacatttataacaaaactattattgttgtgatatttctatattcaatttttctttgatttttctattttatgtatgttttttctaacacaatcataaga

SEQ ID NO: 2398 - DNA, 200 bp, Euphorbia heterophylla
tcttatgattgtgttagaaaaaacatacataaaatagaaaaatcaaagaaaaattgaatatagaaatatcacaacaataatagttttgttataaatgtatattttggttaattttccatataataatgacataataacctataaaggggcctaacaatataataaaagtaaagtatagggagatagtaattagaaaatat

SEQ ID NO: 2399 - DNA, 200 bp, Euphorbia heterophylla
tgttttttctaacacaatcataagactggaatgtaataagatgttagaaaataagcaaaacaaacatcttatttgtgaaatatcttcaaaaatcaatacatatgatcactagttaagaaaatattgtaaaaaagtgtatggaacatcaatgattttgtgtgaaaatgcttaacgattgatagagtgaggtagaaataaga

SEQ ID NO: 2400 - DNA, 200 bp, Euphorbia heterophylla
tcttatttctacctcactctatcaatcgttaagcattttcacacaaaatcattgatgttccatacacttttttacaatattttcttaactagtgatcatatgtattgatttttgaagatatttcacaaataagatgtttgttttgcttattttctaacatcttattacattccagtcttatgattgtgttagaaaaaaca

SEQ ID NO: 2401 - DNA, 200 bp, Euphorbia heterophylla
ttgatagagtgaggtagaaataagaaaatgcaaaacatacggaggtataaattatgtttttaaaacacagggaggtgttagtatattatgtcaaaactgagggaagttgtaattatttatccttaatttccggaacttttcgggacagtagcttggaaaagcacgaaaatgtaacttttcggaaaaacaatcccaaactg

SEQ ID NO: 2402 - DNA, 200 bp, Euphorbia heterophylla
cagtttgggattgtttttccgaaaagttacattttcgtgcttttccaagctactgtcccgaaaagttccggaaattaaggataaataattacaacttccctcagttttgacataatatactaacacctccctgtgttttaaaaacataatttatacctccgtatgttttgcattttcttatttctacctcactctatcaa

SEQ ID NO: 2403 - DNA, 200 bp, Euphorbia heterophylla
ttttcggaaaaacaatcccaaactggcccacttattcagtaatgtatcacaatatatttcttcttttttgaattctaccctaaatttccgtgtcttcacttttaggttaagctttcgggatctattagtagccaatacttgactgctttgctgatggctgctcctctgtctcttggagacgtagaaatcgagattatcga

SEQ ID NO: 2404 - DNA, 200 bp, Euphorbia heterophylla
tcgataatctcgatttctacgtctccaagagacagaggagcagccatcagcaaagcagtcaagtattggctactaatagatcccgaaagcttaacctaaaagtgaagacacggaaatttagggtagaattcaaaaaagaagaaatatattgtgatacattactgaataagtgggccagtttgggattgtttttccgaaaa

SEQ ID NO: 2405 - DNA, 200 bp, Euphorbia heterophylla
gagacgtagaaatcgagattatcgataaactgatttcaattccttacgttgagatgactttaaagctaatggaacgctacggtgtttctgtacaacacagtagtagctgggatcgtttcttcattccaggaggtcaaaagtacaagtacgtattttttgggttcaacttccaaaactcccttgtggtttcctcattttca

SEQ ID NO: 2406 - DNA, 200 bp, Euphorbia heterophylla
tgaaaatgaggaaaccacaagggagttttggaagttgaacccaaaaaatacgtacttgtacttttgacctcctggaatgaagaaacgatcccagctactactgtgttgtacagaaacaccgtagcgttccattagctttaaagtcatctcaacgtaaggaattgaaatcagtttatcgataatctcgatttctacgtctc

SEQ ID NO: 2407 - DNA, 200 bp, Euphorbia heterophylla
ctcccttgtggtttcctcattttcaaaaaggcccttagtgtaatttttttttcaaaagggcccttgtggtataaaaaattagcaaaaaaagaggagtctctctcaacaaagatagttgttttgacttggcaaagggtattttcatcaaaccccaaatttttcaaaatttaaataaaaaaattattatatttcagattgtc

SEQ ID NO: 2408 - DNA, 200 bp, Euphorbia heterophylla
gacaatctgaaatataataatttttttatttaaattttgaaaaatttggggtttgatgaaaataccctttgccaagtcaaaacaactatctttgttgagagagactcctctttttttgctaattttttataccacaagggcccttttgaaaaaaaaattacactaagggcctttttgaaaatgaggaaaccacaagggag

SEQ ID NO: 2409 - DNA, 200 bp, Euphorbia heterophylla
aaaaattattatatttcagattgtcaactcaaggtaactaactttgatgtgaaaaataatcccctttttgcttattcttgataccacaaggactcttctgaaaaaaagttacacaagggcctttttgtacacgagtaaaaccacaggggggttcttgaagttaaccctattttttggattagtaaattcagaaagtttga

SEQ ID NO: 2410 - DNA, 200 bp, Euphorbia heterophylla
tcaaactttctgaatttactaatccaaaaaatagggttaacttcaagaacccccctgtggttttactcgtgtacaaaaaggcccttgtgtaactttttttcagaagagtccttgtggtatcaagaataagcaaaaaggggattatttttcacatcaaagttagttaccttgagttgacaatctgaaatataataattttt

SEQ ID NO: 2411 - DNA, 200 bp, Euphorbia heterophylla
ggattagtaaattcagaaagtttgattatgctgaagaaacgacaacctgaaatatcgatcaactaggtctcccggaaattcttatgttgaaggagatgcctcaagtgccagctactttctagccggagcagcaattaccggtggaactatcactgttgaaggttgtgggactagcagtttgcaggtaaatcacggaactt

SEQ ID NO: 2412 - DNA, 200 bp, Euphorbia heterophylla
aagttccgtgatttacctgcaaactgctagtcccacaaccttcaacagtgatagttccaccggtaattgctgctccggctagaaagtagctggcacttgaggcatctccttcaacataagaatttccgggagacctagttgatcgatatttcaggttgtcgtttcttcagcataatcaaactttctgaatttactaatcc

SEQ ID NO: 2413 - DNA, 200 bp, Euphorbia heterophylla
agtttgcaggtaaatcacggaactttttcgtattagacatttacattttcacatgtgatgtaaattacgtgttatatgaaaatctagggagatgtgaagtttgccgaggttttggagaagatgggagctaaagttacctggacggagaacagtgtaactgtgactggaccaccacggaattctcctcatcaaaaacactt

SEQ ID NO: 2414 - DNA, 200 bp, Euphorbia heterophylla
aagtgtttttgatgaggagaattccgtggtggtccagtcacagttacactgttctccgtccaggtaactttagctcccatcttctccaaaacctcggcaaacttcacatctccctagattttcatataacacgtaatttacatcacatgtgaaaatgtaaatgtctaatacgaaaaagttccgtgatttacctgcaaact

SEQ ID NO: 2415 - DNA, 200 bp, Euphorbia heterophylla
ggaattctcctcatcaaaaacacttgcgtgctattgatgtgaacatgaacaaaatgccagatgttgctatgacattggctgtggttgcactttttgctgatggcccgaccgccatcagagacggtaatttccttttattttcatgaagggtaaacttcaaaaaagaaccttttggtttcgctcattttcaaaacggggtc

SEQ ID NO: 2416 - DNA, 200 bp, Euphorbia heterophylla
gaccccgttttgaaaatgagcgaaaccaaaaggttcttttttgaagtttacccttcatgaaaataaaaggaaattaccgtctctgatggcggtcgggccatcagcaaaaagtgcaaccacagccaatgtcatagcaacatctggcattttgttcatgttcacatcaatagcacgcaagtgtttttgatgaggagaattcc

SEQ ID NO: 2417 - DNA, 200 bp, Euphorbia heterophylla
tttcgctcattttcaaaacggggtctaagaattttttttgtaaaattgggtttgtagtttcaaaaatttagcaaaaatgggcctttggcttcgaaatagtggtgttacattgaatatttataaaaaatttaacattctaataatttaaccttatcatttaaaaattaaatgctagagtttgaataattttcggagatttt

SEQ ID NO: 2418 - DNA, 200 bp, Euphorbia heterophylla
aaaatctccgaaaattattcaaactctagcatttaatttttaaatgataaggttaaattattagaatgttaaattttttataaatattcaatgtaacaccactatttcgaagccaaaggcccatttttgctaaatttttgaaactacaaacccaattttacaaaaaaaattcttagaccccgttttgaaaatgagcgaaa

SEQ ID NO: 2419 - DNA, 200 bp, Euphorbia heterophylla
agtttgaataattttcggagatttttttaagtttattatcataatttgtttaaaaaatatatttgcacttgtcaaaattttttaccgatgtgtattatattttgaataatcattccgaaaaaattcagataaaaacaaacaaagattaacaatttccgtgacatgttttaatattgagtagcctttatttgcgaattttc

SEQ ID NO: 2420 - DNA, 200 bp, Euphorbia heterophylla
gaaaattcgcaaataaaggctactcaatattaaaacatgtcacggaaattgttaatctttgtttgtttttatctgaattttttcggaatgattattcaaaatataatacacatcggtaaaaaattttgacaagtgcaaatatattttttaaacaaattatgataataaacttaaaaaaatctccgaaaattattcaaact

SEQ ID NO: 2421 - DNA, 200 bp, Euphorbia heterophylla
gagtagcctttatttgcgaattttctgaaaccacgtaccccgttttgaaaaaaaaaaaattcctcagaccccattttgtaaatgagtgaaatcacaaggtacttttttgaagtttaccctttcatgaattatgcttcgtattcttcaaataattcgaaaaggcggcctaacatttccatggacctgaactccatatataa

SEQ ID NO: 2422 - DNA, 200 bp, Euphorbia heterophylla
ttatatatggagttcaggtccatggaaatgttaggccgccttttcgaattatttgaagaatacgaagcataattcatgaaagggtaaacttcaaaaaagtaccttgtgatttcactcatttacaaaatggggtctgaggaattttttttttttcaaaacggggtacgtggtttcagaaaattcgcaaataaaggctactc

SEQ ID NO: 2423 - DNA, 200 bp, Euphorbia heterophylla
ccatggacctgaactccatatataataccgagcaattttaacaatgattcgattgtaaaacctattgactcaaatgtaattcggatcctaaatacgaattccctttttctctctctcgatctttccagtggcaagttggagagtgaaagaaaccgaaaggatgattgctgtgtgcacggaactcaggaaggttagtttct

SEQ ID NO: 2424 - DNA, 200 bp, Euphorbia heterophylla
agaaactaaccttcctgagttccgtgcacacagcaatcatcctttcggtttctttcactctccaacttgccactggaaagatcgagagagagaaaaagggaattcgtatttaggatccgaattacatttgagtcaataggttttacaatcgaatcattgttaaaattgctcggtattatatatggagttcaggtccatgg

SEQ ID NO: 2425 - DNA, 200 bp, Euphorbia heterophylla
acggaactcaggaaggttagtttcttataaataaatttcactggatttgtatacagtaaaacgaaaatttgtcggcttatcgactctaattataatattatcaattgttggaatttcagttaggagcaacagttgaagaaggggaagattactgtgtgataactccacccgagaaactaaaaatagctgagattgacact

SEQ ID NO: 2426 - DNA, 200 bp, Euphorbia heterophylla
agtgtcaatctcagctatttttagtttctcgggtggagttatcacacagtaatcttccccttcttcaactgttgctcctaactgaaattccaacaattgataatattataattagagtcgataagccgacaaattttcgttttactgtatacaaatccagtgaaatttatttataagaaactaaccttcctgagttccgt

SEQ ID NO: 2427 - DNA, 200 bp, Euphorbia heterophylla
actaaaaatagctgagattgacacttatgacgatcacagaatggccatggctttctctcttgctgcctgtggagaagttccggtcactatcaaggatcctggatgcactcgaaaaactttcccggactactttgaagttctccataggtatactaagcaatgaacaaaaaacccgaaaaacttgacaattgatactaaag

SEQ ID NO: 2428 - DNA, 200 bp, Euphorbia heterophylla
ctttagtatcaattgtcaagtttttcgggttttttgttcattgcttagtatacctatggagaacttcaaagtagtccgggaaagtttttcgagtgcatccaggatccttgatagtgaccggaacttctccacaggcagcaagagagaaagccatggccattctgtgatcgtcataagtgtcaatctcagctatttttagt

SEQ ID NO: 2429 - DNA, 200 bp, Euphorbia heterophylla
aaaaacttgacaattgatactaaagagagaattgttgctgcaatcaatgcaattctgatgatttattcaagtaagttgatatttgttaatgtactggactagccttttttcttacctcaaatgttggctgttattgtagacaatgtattttgggttgaatccatattgtaatctatcgagttaataagcaatgaaaggat

SEQ ID NO: 2430 - DNA, 200 bp, Euphorbia heterophylla
atcctttcattgcttattaactcgatagattacaatatggattcaacccaaaatacattgtctacaataacagccaacatttgaggtaagaaaaaaggctagtccagtacattaacaaatatcaacttacttgaataaatcatcagaattgcattgattgcagcaacaattctctctttagtatcaattgtcaagttttt

SEQ ID NO: 2431 - DNA, 200 bp, Euphorbia heterophylla
tcgagttaataagcaatgaaaggatgaatgttctatttaagccctgtacttttggactacaactcaatgaagttcagttcagtttagctacgtgtagttataaatttactctaaaatacgttctattcagtttaattcagaaaattgtagtaattaatacaaaatataggcaaaacccatattgagccccttgccaccta

SEQ ID NO: 2432 - DNA, 200 bp, Euphorbia heterophylla
taggtggcaaggggctcaatatgggttttgcctatattttgtattaattactacaattttctgaattaaactgaatagaacgtattttagagtaaatttataactacacgtagctaaactgaactgaacttcattgagttgtagtccaaaagtacagggcttaaatagaacattcatcctttcattgcttattaactcga

SEQ ID NO: 2433 - DNA, 200 bp, Euphorbia heterophylla
cccatattgagccccttgccacctaaactttcagatgtccctttaagctcccccaacttggtacatttgacctccgagctccctcaagcttaaaattaggcatgaaagcttgagggataaagcttgagggagctcgcgtagttttaagctcgaaggagcttgaagggtcatttgtgtcaaactaggggagttcgaaaggt

SEQ ID NO: 2434 - DNA, 200 bp, Euphorbia heterophylla
acctttcgaactcccctagtttgacacaaatgacccttcaagctccttcgagcttaaaactacgcgagctccctcaagctttatccctcaagctttcatgcctaattttaagcttgagggagctcggaggtcaaatgtaccaagttgggggagcttaaagggacatctgaaagtttaggtggcaaggggctcaatatggg

SEQ ID NO: 2435 - DNA, 200 bp, Euphorbia heterophylla
gtcaaactaggggagttcgaaaggtcatttgtgccaacttgagggagcagagagggtcaattgtgtcaagtttagagggttaggaggttcatccgaaagtttgggcacccaagaggaaaaaattgccaaatttaggaggctcaatatggatttcgcctagaatatacttaaatatagatgcatgactcttatggtctatt

SEQ ID NO: 2436 - DNA, 200 bp, Euphorbia heterophylla
aatagaccataagagtcatgcatctatatttaagtatattctaggcgaaatccatattgagcctcctaaatttggcaattttttcctcttgggtgcccaaactttcggatgaacctcctaaccctctaaacttgacacaattgaccctctctgctccctcaagttggcacaaatgacctttcgaactcccctagtttgac

SEQ ID NO: 2437 - DNA, 200 bp, Euphorbia heterophylla
agatgcatgactcttatggtctattaataaatactatagttacaagtaccgcttcctcttaggagaaaactaatgcatttttaaaaggttatgggcttgcaagtatcttttcaaagttttaagggcaataagcgaatgagataagttgagggagctagttccatgtagggaaaccctgcctgttgaaaatcgtttgtaag

SEQ ID NO: 2438 - DNA, 200 bp, Euphorbia heterophylla
cttacaaacgattttcaacaggcagggtttccctacatggaactagctccctcaacttatctcattcgcttattgcccttaaaactttgaaaagatacttgcaagcccataaccttttaaaaatgcattagttttctcctaagaggaagcggtacttgtaactatagtatttattaatagaccataagagtcatgcatct

SEQ ID NO: 2439 - DNA, 200 bp, Euphorbia heterophylla
ctgcctgttgaaaatcgtttgtaagccatatgatagtacggtgaaaacaaaattttagcgaaactcatgtggatggcaagcaaaggaaaggagaatgactaaaggaggtaaggtgtaaaagagtaaatctaaaaatagaatcacattctttaaaagccaatctcaatctaacattaaataatgaagcatgtaacatgttg

SEQ ID NO: 2440 - DNA, 200 bp, Euphorbia heterophylla
caacatgttacatgcttcattatttaatgttagattgagattggcttttaaagaatgtgattctatttttagatttactcttttacaccttacctcctttagtcattctcctttcctttgcttgccatccacatgagtttcgctaaaattttgttttcaccgtactatcatatggcttacaaacgattttcaacaggcag

SEQ ID NO: 2441 - DNA, 200 bp, Euphorbia heterophylla
aaataatgaagcatgtaacatgttgcctttgtccatatgacataacattattaaggcatgtcgccctcctcctatttatttttcttacactttctcacatggatgcctaccttggttgttggatatgtcttttatttatttatttccttcttaatttacacatttcactattaaacatcaatcgatctcttctaatatag

SEQ ID NO: 2442 - DNA, 200 bp, Euphorbia heterophylla
ctatattagaagagatcgattgatgtttaatagtgaaatgtgtaaattaagaaggaaataaataaataaaagacatatccaacaaccaaggtaggcatccatgtgagaaagtgtaagaaaaataaataggaggagggcgacatgccttaataatgttatgtcatatggacaaaggcaacatgttacatgcttcattattt

SEQ ID NO: 2443 - DNA, 200 bp, Euphorbia heterophylla
catcaatcgatctcttctaatatagtactttaagttaagaatattctcaattaaatgtggaatgaaacaaaaaataattgtatcaatagcaagaataaataattatacttaaaaaacatgtcccacaaaattagattcaatagatgtgaagtcaatattttacaagcaaccactaaattaggttcagtggtcacaacttc

SEQ ID NO: 2444 - DNA, 200 bp, Euphorbia heterophylla
gaagttgtgaccactgaacctaatttagtggttgcttgtaaaatattgacttcacatctattgaatctaattttgtgggacatgttttttaagtataattatttattcttgctattgatacaattattttttgtttcattccacatttaattgagaatattcttaacttaaagtactatattagaagagatcgattgatg

SEQ ID NO: 2445 - DNA, 200 bp, Euphorbia heterophylla
aattaggttcagtggtcacaacttcttttaaaagtggagaaagaagttggggtcctgagttcgagccccatattcctcaaaatttaaatgttcttattacctaaaaatatattattacaagctatatttgttgaaatctctaatttgctatacataaggtctaaaaatattagatctaacattaatgtcgtatgcttgaa

SEQ ID NO: 2446 - DNA, 200 bp, Euphorbia heterophylla
ttcaagcatacgacattaatgttagatctaatatttttagaccttatgtatagcaaattagagatttcaacaaatatagcttgtaataatatatttttaggtaataagaacatttaaattttgaggaatatggggctcgaactcaggaccccaacttctttctccacttttaaaagaagttgtgaccactgaacctaatt

SEQ ID NO: 2447 - DNA, 200 bp, Euphorbia heterophylla
ctaacattaatgtcgtatgcttgaacaacatccactttatacattattcgatcacttgctgattattgaaaatacaaaagcactaaaagctacttcctccatctagatttaatggtttttttagaccttttttcacatcttttttagttgtcaattcctatttaccatgtacttttccagtcatgcccctattaattgca

SEQ ID NO: 2448 - DNA, 200 bp, Euphorbia heterophylla
tgcaattaataggggcatgactggaaaagtacatggtaaataggaattgacaactaaaaaagatgtgaaaaaaggtctaaaaaaaccattaaatctagatggaggaagtagcttttagtgcttttgtattttcaataatcagcaagtgatcgaataatgtataaagtggatgttgttcaagcatacgacattaatgttag

SEQ ID NO: 2449 - DNA, 200 bp, Euphorbia heterophylla
attttcctgaacatcttttttccaaattatttcctagatcactgtgaatatctcattcatattttcagttttatgtaataactgaaggatacgcagttatgtatggctttggactctttgtacaccactgcccccctactagggctgagcataatgcggttttaaccgaaacaccgacccaaactgaattatgatatttg

SEQ ID NO: 2450 - DNA, 200 bp, Euphorbia heterophylla
caaatatcataattcagtttgggtcggtgtttcggttaaaaccgcattatgctcagccctagtaggggggcagtggtgtacaaagagtccaaagccatacataactgcgtatccttcagttattacataaaactgaaaatatgaatgagatattcacagtgatctaggaaataatttggaaaaaagatgttcaggaaaat

SEQ ID NO: 2451 - DNA, 200 bp, Euphorbia heterophylla
gacccaaactgaattatgatatttggttcggttatttaatatttcagtttgttattcgtttttctgttcggtctggtttcaagaggcaaaaattgtgaaaaactgaaccaaattataggttttcatatgtaagtaggtccaagccaaacccaatccaatagcttcattttcatatgcaagtcatcatctactttaaccaa

SEQ ID NO: 2452 - DNA, 200 bp, Euphorbia heterophylla
ttggttaaagtagatgatgacttgcatatgaaaatgaagctattggattgggtttggcttggacctacttacatatgaaaacctataatttggttcagtttttcacaatttttgcctcttgaaaccagaccgaacagaaaaacgaataacaaactgaaatattaaataaccgaaccaaatatcataattcagtttgggtc

SEQ ID NO: 2453 - DNA, 200 bp, Euphorbia heterophylla
gcaagtcatcatctactttaaccaaataattcttttcttttactctctccaagtaaaccccaattaattgcaatttttgttaaataaattctgtctgttcagaaaaaccgaaatttatccgaaatgttttcagttctgaaagttttatttttggctgtaattcggttcggtttaataagaattttagaaaactcagctgg

SEQ ID NO: 2454 - DNA, 200 bp, Euphorbia heterophylla
ccagctgagttttctaaaattcttattaaaccgaaccgaattacagccaaaaataaaactttcagaactgaaaacatttcggataaatttcggtttttctgaacagacagaatttatttaacaaaaattgcaattaattggggtttacttggagagagtaaaagaaaagaattatttggttaaagtagatgatgacttgc

SEQ ID NO: 2455 - DNA, 200 bp, Euphorbia heterophylla
taagaattttagaaaactcagctgggcttattcggtttggtttacccacatgctcaacccctggctcctattgacctctttccttaaattttttctaattgcgatcaactatcaaaaatgtttcagctacatacttgatggggtgccacgtatgagagagagaccaatcggggatttggtaaccggtcttaagcaacttg

SEQ ID NO: 2456 - DNA, 200 bp, Euphorbia heterophylla
caagttgcttaagaccggttaccaaatccccgattggtctctctctcatacgtggcaccccatcaagtatgtagctgaaacatttttgatagttgatcgcaattagaaaaaatttaaggaaagaggtcaataggagccaggggttgagcatgtgggtaaaccaaaccgaataagcccagctgagttttctaaaattctta

SEQ ID NO: 2457 - DNA, 200 bp, Euphorbia heterophylla
ttggtaaccggtcttaagcaacttggagctgacgtaaattgctcgtccacaaactgcccccctgttcatgtaaatgccaatggtggtcttcctgggggaaaggtataaatatatcatctcattaagtaaatacgaaagaacaatttccttcttcttttgactagatccatcatcattgtatcgcttctaggttaagctat

SEQ ID NO: 2458 - DNA, 200 bp, Euphorbia heterophylla
atagcttaacctagaagcgatacaatgatgatggatctagtcaaaagaagaaggaaattgttctttcgtatttacttaatgagatgatatatttatacctttcccccaggaagaccaccattggcatttacatgaacaggggggcagtttgtggacgagcaatttacgtcagctccaagttgcttaagaccggttaccaa

SEQ ID NO: 2459 - DNA, 200 bp, Euphorbia heterophylla
ttgtatcgcttctaggttaagctatcaggatcaattagtagccaatacttgaccgccttgctcatggcagctcccctggctcttggagacgtagaaatcgagattatcgataaactgatttccattccttatgttgagatgactctgaagttaatggaacgctacggtgtttctgtacaacacactagcagctgggatcg

SEQ ID NO: 2460 - DNA, 200 bp, Euphorbia heterophylla
cgatcccagctgctagtgtgttgtacagaaacaccgtagcgttccattaacttcagagtcatctcaacataaggaatggaaatcagtttatcgataatctcgatttctacgtctccaagagccaggggagctgccatgagcaaggcggtcaagtattggctactaattgatcctgatagcttaacctagaagcgatacaa

SEQ ID NO: 2461 - DNA, 200 bp, Euphorbia heterophylla
tacaacacactagcagctgggatcgtttcttcattcaaagaggtcaaaagtacaagtaggtatttttatcgatttacgaattaggaaaccctagattctttcaaacaaaaaacgaaaaccttaaatgtcaatcaggtccccgggaaattcatatgtcgaaggcgatgcctcgagtgccagttatttcctggcaggtgcag

SEQ ID NO: 2462 - DNA, 200 bp, Euphorbia heterophylla
ctgcacctgccaggaaataactggcactcgaggcatcgccttcgacatatgaatttcccggggacctgattgacatttaaggttttcgttttttgtttgaaagaatctagggtttcctaattcgtaaatcgataaaaatacctacttgtacttttgacctctttgaatgaagaaacgatcccagctgctagtgtgttgta

SEQ ID NO: 2463 - DNA, 200 bp, Euphorbia heterophylla
gccagttatttcctggcaggtgcagcaattaccggtggaactatcactgtagaaggttgtggcacttccagtttacaggtattttttaaaatttcagattttttttcgtattagggatacaaagtaacttgtgattggctgcttgttctatatgaaaattaagggagatgtaaagttcgctgaggttttagaaaagatgg

SEQ ID NO: 2464 - DNA, 200 bp, Euphorbia heterophylla
ccatcttttctaaaacctcagcgaactttacatctcccttaattttcatatagaacaagcagccaatcacaagttactttgtatccctaatacgaaaaaaaatctgaaattttaaaaaatacctgtaaactggaagtgccacaaccttctacagtgatagttccaccggtaattgctgcacctgccaggaaataactggc

SEQ ID NO: 2465 - DNA, 200 bp, Euphorbia heterophylla
ttcgctgaggttttagaaaagatgggagcaaaagttagctggacggagaacagtgttacagtgactgggccaccacgaaattctcctcgtgataagcacttgcgtgctatcgatgtgaacatgaacaaaatgccagatgtcgctatgacattggctgtggttgcgcttttcgctgatggccccactgccataagagacgg

SEQ ID NO: 2466 - DNA, 200 bp, Euphorbia heterophylla
ccgtctcttatggcagtggggccatcagcgaaaagcgcaaccacagccaatgtcatagcgacatctggcattttgttcatgttcacatcgatagcacgcaagtgcttatcacgaggagaatttcgtggtggcccagtcactgtaacactgttctccgtccagctaacttttgctcccatcttttctaaaacctcagcgaa

SEQ ID NO: 2467 - DNA, 200 bp, Euphorbia heterophylla
cgttttcaattaggtcaagttttaacgggtcgccggtttcatcgggtctaaatcggcgccgaacaaagggcgattgtattgttgttaaaggtaaagctagttcgtttaaagtttcagcttcagtagccacaacagagaaaccctctacttcaccggagatagtgttgcaaccaattaaagaaatctccggcaccgtcact

SEQ ID NO: 2468 - DNA, 200 bp, Euphorbia heterophylla
agtgacggtgccggagatttctttaattggttgcaacactatctccggtgaagtagagggtttctctgttgtggctactgaagctgaaactttaaacgaactagctttacctttaacaacaatacaatcgccctttgttcggcgccgatttagacccgatgaaaccggcgacccgttaaaacttgacctaattgaaaacg

SEQ ID NO: 2469 - DNA, 200 bp, Euphorbia heterophylla
taaagaaatctccggcaccgtcactttgccgggttccaagtcgctgtccaatcggattcttctccttgctgctttatccgagggcacaactgttgttgacaacttgctgaatagtgacgatgttcattacatgcttggtgctcttaaaacactgggattacgagtggaagacaatagtgcgatcaaacaagctattgtgg

SEQ ID NO: 2470 - DNA, 200 bp, Euphorbia heterophylla
ccacaatagcttgtttgatcgcactattgtcttccactcgtaatcccagtgttttaagagcaccaagcatgtaatgaacatcgtcactattcagcaagttgtcaacaacagttgtgccctcggataaagcagcaaggagaagaatccgattggacagcgacttggaacccggcaaagtgacggtgccggagatttcttta

SEQ ID NO: 2471 - DNA, 200 bp, Euphorbia heterophylla
agtgcgatcaaacaagctattgtggaaggttgtgggggtcagttccctgcgggtaaagaaccgaaaaaggacattgaactttttctcggaaacgccgggacagcaatgcgccctttgactgctgcagttactgcagccggtggaaattcgagctacatacttgatggggtgccacgtatgagagagagaccaatcgggga

SEQ ID NO: 2472 - DNA, 200 bp, Euphorbia heterophylla
tccccgattggtctctctctcatacgtggcaccccatcaagtatgtagctcgaatttccaccggctgcagtaactgcagcagtcaaagggcgcattgctgtcccggcgtttccgagaaaaagttcaatgtcctttttcggttctttacccgcagggaactgacccccacaaccttccacaatagcttgtttgatcgcact

SEQ ID NO: 2473 - DNA, 200 bp, Euphorbia heterophylla
gtatgagagagagaccaatcggggatttggtaaccggtcttaagcaacttggagctgacgtaaattgctcgtccacaaactgcccccctgttcatgtaaatgccaatggtggtcttcctgggggaaaggttaagctatcaggatcaattagtagccaatacttgaccgccttgctcatggcagctcccctggctcttgga

SEQ ID NO: 2474 - DNA, 200 bp, Euphorbia heterophylla
tccaagagccaggggagctgccatgagcaaggcggtcaagtattggctactaattgatcctgatagcttaacctttcccccaggaagaccaccattggcatttacatgaacaggggggcagtttgtggacgagcaatttacgtcagctccaagttgcttaagaccggttaccaaatccccgattggtctctctctcatac

SEQ ID NO: 2475 - DNA, 200 bp, Euphorbia heterophylla
catggcagctcccctggctcttggagacgtagaaatcgagattatcgataaactgatttccattccttatgttgagatgactctgaagttaatggaacgctacggtgtttctgtaaaacacactagcagctgggatcgtttcttcattcaaagaggtcaaaagtacaagtccccgggaaattcatatgtcgaaggcgatg

SEQ ID NO: 2476 - DNA, 200 bp, Euphorbia heterophylla
catcgccttcgacatatgaatttcccggggacttgtacttttgacctctttgaatgaagaaacgatcccagctgctagtgtgttttacagaaacaccgtagcgttccattaacttcagagtcatctcaacataaggaatggaaatcagtttatcgataatctcgatttctacgtctccaagagccaggggagctgccatg

SEQ ID NO: 2477 - DNA, 200 bp, Euphorbia heterophylla
ggaaattcatatgtcgaaggcgatgcctcgagtgccagttatttcctggccggtgcagcaatcactggtggaactatcactgtagaaggttgtggcacttccagtttacagggagatgtaaagttcgctgaggttttagaaaagatgggagcaaaagttagctggacggagaacagtgttacagtgactgggccaccacg

SEQ ID NO: 2478 - DNA, 200 bp, Euphorbia heterophylla
cgtggtggcccagtcactgtaacactgttctccgtccagctaacttttgctcccatcttttctaaaacctcagcgaactttacatctccctgtaaactggaagtgccacaaccttctacagtgatagttccaccagtgattgctgcaccggccaggaaataactggcactcgaggcatcgccttcgacatatgaatttcc

SEQ ID NO: 2479 - DNA, 200 bp, Euphorbia heterophylla
gtgttacagtgactgggccaccacgaaattctcctcgtgataagcacttgcgtgctatcgatgtgaacatgaacaaaatgccagatgtcgctatgacattggctgtggttgcgcttttcgctgatggccccactgccataagagacgtggcaagttggagagtgaaagaaaccgaaaggatgattgctgtttgcacagaa

SEQ ID NO: 2480 - DNA, 200 bp, Euphorbia heterophylla
ttctgtgcaaacagcaatcatcctttcggtttctttcactctccaacttgccacgtctcttatggcagtggggccatcagcgaaaagcgcaaccacagccaatgtcatagcgacatctggcattttgttcatgttcacatcgatagcacgcaagtgcttatcacgaggagaatttcgtggtggcccagtcactgtaacac

SEQ ID NO: 2481 - DNA, 200 bp, Euphorbia heterophylla
aaggatgattgctgtttgcacagaactaagaaagttaggagcaacagtagaggaaggagcagattactgtgtgataactccgcccgaaaaactaaatataacggagattgacacttacgatgatcaccgaatggcgatggccttctctcttgctgcctgtggggatgttccggtcactattaaagatcccggttgtactc

SEQ ID NO: 2482 - DNA, 200 bp, Euphorbia heterophylla
gagtacaaccgggatctttaatagtgaccggaacatccccacaggcagcaagagagaaggccatcgccattcggtgatcatcgtaagtgtcaatctccgttatatttagtttttcgggcggagttatcacacagtaatctgctccttcctctactgttgctcctaactttcttagttctgtgcaaacagcaatcatcctt

SEQ ID NO: 2483 - DNA, 200 bp, Euphorbia heterophylla
actattaaagatcccggttgtactcgaaaaactttccctgactatttcaagtcctccaaagctttactaagcaatgaccacgaacccctgaaactttactagaattggatcaggctcttatattcaatggatcattcaagtgagtttatgttattaatgtgccgggcataacagattttttataccggatgaatttgtat

SEQ ID NO: 2484 - DNA, 200 bp, Euphorbia heterophylla
atacaaattcatccggtataaaaaatctgttatgcccggcacattaataacataaactcacttgaatgatccattgaatataagagcctgatccaattctagtaaagtttcaggggttcgtggtcattgcttagtaaagctttggaggacttgaaatagtcagggaaagtttttcgagtacaaccgggatctttaatagt

SEQ ID NO: 2485 - DNA, 200 bp, Euphorbia heterophylla
ctttagagaatccaaatccttttcaaattatttcctagatctattgtcgatttctcatttatattttcagttttaggcaataactgaatgatatgcagttatggatggctttggactctggtaatgttttgttaatgtacactactgcctcccaagggctgagcataatgcggtttaaaccgaaacaccgatccaaaccg

SEQ ID NO: 2486 - DNA, 200 bp, Euphorbia heterophylla
cggtttggatcggtgtttcggtttaaaccgcattatgctcagcccttgggaggcagtagtgtacattaacaaaacattaccagagtccaaagccatccataactgcatatcattcagttattgcctaaaactgaaaatataaatgagaaatcgacaatagatctaggaaataatttgaaaaggatttggattctctaaag

SEQ ID NO: 2487 - DNA, 200 bp, Euphorbia heterophylla
taaaccgaaacaccgatccaaaccgaattatgatattcggttcagttatttaatattcctgttttttattcggttttctgttcggtctggtttaagaggcaaaaattgtgaaaaactgaaccaaattataggttttcatatgcaagtaggcccaagccgaacccaaaccaatagtttcattttcatctataagtcattat

SEQ ID NO: 2488 - DNA, 200 bp, Euphorbia heterophylla
ataatgacttatagatgaaaatgaaactattggtttgggttcggcttgggcctacttgcatatgaaaacctataatttggttcagtttttcacaatttttgcctcttaaaccagaccgaacagaaaaccgaataaaaaacaggaatattaaataactgaaccgaatatcataattcggtttggatcggtgtttcggttta

SEQ ID NO: 2489 - DNA, 200 bp, Euphorbia heterophylla
ttcattttcatctataagtcattatctaattcaaccaaatgattcttttcttttattttctccaagtaaaccccaattaattgcaatttttgataaattctgttcagaaaaaccgaaatttagtctaaatgttttcactttcagctctgaaaattcagtttttaggtgtaattcgtttcggttcggtaagcatttttaga

SEQ ID NO: 2490 - DNA, 200 bp, Euphorbia heterophylla
tctaaaaatgcttaccgaaccgaaacgaattacacctaaaaactgaattttcagagctgaaagtgaaaacatttagactaaatttcggtttttctgaacagaatttatcaaaaattgcaattaattggggtttacttggagaaaataaaagaaaagaatcatttggttgaattagataatgacttatagatgaaaatgaa

SEQ ID NO: 2491 - DNA, 200 bp, Euphorbia heterophylla
tttcggttcggtaagcatttttagataactcagctgggcttattcagtttagtatagccaaatgttaaacccctggcccctatcgagctctttcctctaaatttttctaattggaattaactatcaaatgtgtttcagctacatacttgatggggtgccacgaatgagagagagaccaattggggatttggtaaccggtc

SEQ ID NO: 2492 - DNA, 200 bp, Euphorbia heterophylla
gaccggttaccaaatccccaattggtctctctctcattcgtggcaccccatcaagtatgtagctgaaacacatttgatagttaattccaattagaaaaatttagaggaaagagctcgataggggccaggggtttaacatttggctatactaaactgaataagcccagctgagttatctaaaaatgcttaccgaaccgaaa

SEQ ID NO: 2493 - DNA, 200 bp, Euphorbia heterophylla
ccaattggggatttggtaaccggtcttaagcagcttggagccgacgtcaattgctcgtccacaaactgcccccctgttcatgtaaatgcaaatggcggccttcctgggggaaaggtataatatatcgtctcattaagtaaatatgaaagaacaagttttcctcttgttttgactagatccatcattattgtatccctttt

SEQ ID NO: 2494 - DNA, 200 bp, Euphorbia heterophylla
aaaagggatacaataatgatggatctagtcaaaacaagaggaaaacttgttctttcatatttacttaatgagacgatatattatacctttcccccaggaaggccgccatttgcatttacatgaacaggggggcagtttgtggacgagcaattgacgtcggctccaagctgcttaagaccggttaccaaatccccaattgg

SEQ ID NO: 2495 - DNA, 200 bp, Euphorbia heterophylla
gatccatcattattgtatcccttttaggttaagctctcaggatcaattagtagccaatacttgactgctttgctcatggcagctcccctggctcttggagacgtagaaatcgagattatcgataaactaatttccattccttacgttgagatgactttgaagttaatggaacgttacggtgtttctgtaaaacacactag

SEQ ID NO: 2496 - DNA, 200 bp, Euphorbia heterophylla
ctagtgtgttttacagaaacaccgtaacgttccattaacttcaaagtcatctcaacgtaaggaatggaaattagtttatcgataatctcgatttctacgtctccaagagccaggggagctgccatgagcaaagcagtcaagtattggctactaattgatcctgagagcttaacctaaaagggatacaataatgatggatc

SEQ ID NO: 2497 - DNA, 200 bp, Euphorbia heterophylla
acggtgtttctgtaaaacacactagtagctgggatcgtttcttcattcaaagaggtcaaaagtacaagtaggtattttcgttgatttacgaattccgaaaccctcgattttcgttcgaacaaaaaaatgaaaacccggaatgtcaattaggtccccgggaaattcatatgttgaaggcgatgcctcgagtgccagttatt

SEQ ID NO: 2498 - DNA, 200 bp, Euphorbia heterophylla
aataactggcactcgaggcatcgccttcaacatatgaatttcccggggacctaattgacattccgggttttcatttttttgttcgaacgaaaatcgagggtttcggaattcgtaaatcaacgaaaatacctacttgtacttttgacctctttgaatgaagaaacgatcccagctactagtgtgttttacagaaacaccgt

SEQ ID NO: 2499 - DNA, 200 bp, Euphorbia heterophylla
ggcgatgcctcgagtgccagttatttcctggccggtgcagcaatcactggtggaactatcactgtagaaggttgtggcacaactagtttacaggtattttttgtagttattgctttgtgttggttaaaatttcagaatttttttcgtattagggatacaaagtgacttgttatatggaatttcagggagatgtgaagttt

SEQ ID NO: 2500 - DNA, 200 bp, Euphorbia heterophylla
aaacttcacatctccctgaaattccatataacaagtcactttgtatccctaatacgaaaaaaattctgaaattttaaccaacacaaagcaataactacaaaaaatacctgtaaactagttgtgccacaaccttctacagtgatagttccaccagtgattgctgcaccggccaggaaataactggcactcgaggcatcgcc

SEQ ID NO: 2501 - DNA, 200 bp, Euphorbia heterophylla
ggaatttcagggagatgtgaagtttgccgaggttttagagaagatgggagcaaaagttagctggacagagaatagtgttacagtgactgggccaccgcgaaattctcctcgtgacaagcacttgcgtgccatcgatgtgaacatgaacaaaatgccagatgtcgctatgacattggctgtcgttgcgctttttgctgatg

SEQ ID NO: 2502 - DNA, 200 bp, Euphorbia heterophylla
catcagcaaaaagcgcaacgacagccaatgtcatagcgacatctggcattttgttcatgttcacatcgatggcacgcaagtgcttgtcacgaggagaatttcgcggtggcccagtcactgtaacactattctctgtccagctaacttttgctcccatcttctctaaaacctcggcaaacttcacatctccctgaaattcc

SEQ ID NO: 2503 - DNA, 200 bp, Euphorbia heterophylla
aatagttcttttgtgtaaaatattaagaataaaatactattaaatctaaagtgattagttagttaaagacacgtgttagctttgtttgaattaaactctaatctcattgatttttcttacctccattatcaccaccatcatcatctcttaacatttatttccttacaaattttctttagtctattcaacttctaaattta

SEQ ID NO: 2504 - DNA, 200 bp, Euphorbia heterophylla
taaatttagaagttgaatagactaaagaaaatttgtaaggaaataaatgttaagagatgatgatggtggtgataatggaggtaagaaaaatcaatgagattagagtttaattcaaacaaagctaacacgtgtctttaactaactaatcactttagatttaatagtattttattcttaatattttacacaaaagaactatt

SEQ ID NO: 2505 - DNA, 200 bp, Euphorbia heterophylla
ttagtctattcaacttctaaatttaaaattgaagttgaagtgcattcatcttccatactatactgctatcaatctccaaatttcattcttgttcaatccttttagtacctataaataattcttcatttactctttcaacaacatgtatctaaaaaaaaagttagagcatgttgatgtaaactttattagcgattttgcgg

SEQ ID NO: 2506 - DNA, 200 bp, Euphorbia heterophylla
ccgcaaaatcgctaataaagtttacatcaacatgctctaactttttttttagatacatgttgttgaaagagtaaatgaagaattatttataggtactaaaaggattgaacaagaatgaaatttggagattgatagcagtatagtatggaagatgaatgcacttcaacttcaattttaaatttagaagttgaatagactaa

SEQ ID NO: 2507 - DNA, 200 bp, Euphorbia heterophylla
gtaaactttattagcgattttgcggttaggtttactcatagacatcattttatttgatctatgataaagttttagttatagtattattttctgctttataatgtgaaattttgatgttctgtttaatctattattaaatgtcgtagtaaaagttcaatattatatgtttcattttaaattttaactcattaatagggccc

SEQ ID NO: 2508 - DNA, 200 bp, Euphorbia heterophylla
gggccctattaatgagttaaaatttaaaatgaaacatataatattgaacttttactacgacatttaataatagattaaacagaacatcaaaatttcacattataaagcagaaaataatactataactaaaactttatcatagatcaaataaaatgatgtctatgagtaaacctaaccgcaaaatcgctaataaagtttac

SEQ ID NO: 2509 - DNA, 200 bp, Euphorbia heterophylla
aaattttaactcattaatagggccccgatttttattatcgcccataggccccaaaaaggtaggaacgggcctgatgataacatgcccaattttgttccggttaattaatcttcgattcaatctttatcaaaacaatcttggagtcaatttctagaaaaataatatttgaaatatcaacatcaagggcctgtggggttcac

SEQ ID NO: 2510 - DNA, 200 bp, Euphorbia heterophylla
gtgaaccccacaggcccttgatgttgatatttcaaatattatttttctagaaattgactccaagattgttttgataaagattgaatcgaagattaattaaccggaacaaaattgggcatgttatcatcaggcccgttcctacctttttggggcctatgggcgataataaaaatcggggccctattaatgagttaaaattt

SEQ ID NO: 2511 - DNA, 200 bp, Euphorbia heterophylla
aacatcaagggcctgtggggttcacttttaacaagttcagggagctataatgtcaagtttaacaagtttagggggttcagggacctttgtaagttcaggggattaaggggtttttagggacaactatagggggtttagatgtattaggcccaaaaataattataaatttgaaagcgtagtttaaattgccaaaccgagta

SEQ ID NO: 2512 - DNA, 200 bp, Euphorbia heterophylla
tactcggtttggcaatttaaactacgctttcaaatttataattatttttgggcctaatacatctaaaccccctatagttgtccctaaaaaccccttaatcccctgaacttacaaaggtccctgaaccccctaaacttgttaaacttgacattatagctccctgaacttgttaaaagtgaaccccacaggcccttgatgtt

SEQ ID NO: 2513 - DNA, 200 bp, Euphorbia heterophylla
gtagtttaaattgccaaaccgagtaaactgtttcggcattctcttgtttccagtggcaagttggagagtgaaagaaaccgaaaggatgattgctgtttgcacagaactcaggaaggttagttgctgataaattttggctattataaaaacaaaacttattggcatataattataatttataatgttggattaaattgatt

SEQ ID NO: 2514 - DNA, 200 bp, Euphorbia heterophylla
aatcaatttaatccaacattataaattataattatatgccaataagttttgtttttataatagccaaaatttatcagcaactaaccttcctgagttctgtgcaaacagcaatcatcctttcggtttctttcactctccaacttgccactggaaacaagagaatgccgaaacagtttactcggtttggcaatttaaactac

SEQ ID NO: 2515 - DNA, 200 bp, Euphorbia heterophylla
tttataatgttggattaaattgattaattattccattatatattcagttaggagcaacagtagaggaaggagcagattactgtgtgataactccgccggaaaaactaaatataacggagattgacacttacgatgatcaccgaatggcgatggccttctctcttgctgcctgtggggatgttccggtcactattaaagat

SEQ ID NO: 2516 - DNA, 200 bp, Euphorbia heterophylla
atctttaatagtgaccggaacatccccacaggcagcaagagagaaggccatcgccattcggtgatcatcgtaagtgtcaatctccgttatatttagtttttccggcggagttatcacacagtaatctgctccttcctctactgttgctcctaactgaatatataatggaataattaatcaatttaatccaacattataaa

SEQ ID NO: 2517 - DNA, 200 bp, Euphorbia heterophylla
ggatgttccggtcactattaaagatcccggttgtactcgaaaaactttccctgactactttcaagtcctccaaagctttaccaagcaatgaccacgaacccctaaaacattggagtactagaaatggatcaggctcttatattcaatggatcattcaagtgagtttatgttattaatgtgccggacataacagattttgt

SEQ ID NO: 2518 - DNA, 200 bp, Euphorbia heterophylla
acaaaatctgttatgtccggcacattaataacataaactcacttgaatgatccattgaatataagagcctgatccatttctagtactccaatgttttaggggttcgtggtcattgcttggtaaagctttggaggacttgaaagtagtcagggaaagtttttcgagtacaaccgggatctttaatagtgaccggaacatcc

SEQ ID NO: 2519 - DNA, 200 bp, Euphorbia heterophylla
atgtgccggacataacagattttgttagacaatgtataccggatgaatttgtattttatgttttgtatttgtattctatcaagttgatcagcaataaatgggtgaatgtgttaatttttgtgatatacttacagtgttattattcagttcgaccggttttactgtgaaccggctatggtcacagagcgatttagttaaaa

SEQ ID NO: 2520 - DNA, 200 bp, Euphorbia heterophylla
ttttaactaaatcgctctgtgaccatagccggttcacagtaaaaccggtcgaactgaataataacactgtaagtatatcacaaaaattaacacattcacccatttattgctgatcaacttgatagaatacaaatacaaaacataaaatacaaattcatccggtatacattgtctaacaaaatctgttatgtccggcacat

SEQ ID NO: 2521 - DNA, 200 bp, Euphorbia heterophylla
tggtcacagagcgatttagttaaaattgggttgaacatgaaaaaatcggtaaacccttgtggcaaaaataaaatgcgttgctaaacacataaaaaagatttgtaatagccttatacgttcttttccaaaattcctttggcaactttgtggaacgtcgtaatagacctagaaagcggtgaaatagtcacttgaaatcataa

SEQ ID NO: 2522 - DNA, 200 bp, Euphorbia heterophylla
ttatgatttcaagtgactatttcaccgctttctaggtctattacgacgttccacaaagttgccaaaggaattttggaaaagaacgtataaggctattacaaatcttttttatgtgtttagcaacgcattttatttttgccacaagggtttaccgattttttcatgttcaacccaattttaactaaatcgctctgtgacca

SEQ ID NO: 2523 - DNA, 200 bp, Euphorbia heterophylla
gtgaaatagtcacttgaaatcataaactctctctctatatataccttttagcccttcaatttctttactaattgaagcaagtaaaatacaaactcatttctttttcaagttagtgatataagtttgtttctttaacacccaaagataacacatccccaagaaggaatactcattcacttgttgaagaattatcttcttta

SEQ ID NO: 2524 - DNA, 200 bp, Euphorbia heterophylla
taaagaagataattcttcaacaagtgaatgagtattccttcttggggatgtgttatctttgggtgttaaagaaacaaacttatatcactaacttgaaaaagaaatgagtttgtattttacttgcttcaattagtaaagaaattgaagggctaaaaggtatatatagagagagagtttatgatttcaagtgactatttcac

SEQ ID NO: 2525 - DNA, 200 bp, Euphorbia heterophylla
acttgttgaagaattatcttctttattagttgaaacataacttacatctgaataatcttcgaaaaccaaagaaaattccgtataggtcaaaccatgatccttggttcctttgaagtactttaatactcggcctaaagcttgtcaacgatgcgaactatgactactagtatatcaaccgagctttccaacaacacaagcta

SEQ ID NO: 2526 - DNA, 200 bp, Euphorbia heterophylla
tagcttgtgttgttggaaagctcggttgatatactagtagtcatagttcgcatcgttgacaagctttaggccgagtattaaagtacttcaaaggaaccaaggatcatggtttgacctatacggaattttctttggttttcgaagattattcagatgtaagttatgtttcaactaataaagaagataattcttcaacaagt

SEQ ID NO: 2527 - DNA, 200 bp, Euphorbia heterophylla
ccgagctttccaacaacacaagctatatatggcttagtgctaatcacatacacactttttatatacacacttgcatacttggttgataacaaaaccattagataaaatcacatcatcgaacttttaatgtcacacttttctgtgggcgttttagcccatataacaaattctttagcttgcataccttattttctcaacct

SEQ ID NO: 2528 - DNA, 200 bp, Euphorbia heterophylla
aggttgagaaaataaggtatgcaagctaaagaatttgttatatgggctaaaacgcccacagaaaagtgtgacattaaaagttcgatgatgtgattttatctaatggttttgttatcaaccaagtatgcaagtgtgtatataaaaagtgtgtatgtgattagcactaagccatatatagcttgtgttgttggaaagctcgg

SEQ ID NO: 2529 - DNA, 200 bp, Euphorbia heterophylla
cttgcataccttattttctcaacctgacataacaaacccttgaatctgattgtttttcgatgcccgagaccaaagaatatcattataataccatctatataaaaaaatgagactgaatcacctatatttcggatatcaacaggtttccacaacttcttcaacacttattacacaaactgccttaaaatttacaatttgat

SEQ ID NO: 2530 - DNA, 200 bp, Euphorbia heterophylla
atcaaattgtaaattttaaggcagtttgtgtaataagtgttgaagaagttgtggaaacctgttgatatccgaaatataggtgattcagtctcatttttttatatagatggtattataatgatattctttggtctcgggcatcgaaaaacaatcagattcaagggtttgttatgtcaggttgagaaaataaggtatgcaag

SEQ ID NO: 2531 - DNA, 200 bp, Euphorbia heterophylla
actgccttaaaatttacaatttgatgggtatagtagatgattgcagaaaggctttttttaagctcaaaaatcacgtggatgacatggaaaggaaaagaggaagaagctgtaaagataacatcacattcctcaaaaaccaatctcaatctaacattaaatcattaggcatggaacatgttagctttgtctttataattaaa

SEQ ID NO: 2532 - DNA, 200 bp, Euphorbia heterophylla
tttaattataaagacaaagctaacatgttccatgcctaatgatttaatgttagattgagattggtttttgaggaatgtgatgttatctttacagcttcttcctcttttcctttccatgtcatccacgtgatttttgagcttaaaaaaagcctttctgcaatcatctactatacccatcaaattgtaaattttaaggcagt

SEQ ID NO: 2533 - DNA, 200 bp, Euphorbia heterophylla
gacagactttgacccaggcaattgaacagtaccagagatctctttgatgggttgtaacacaatttctgggacagatgaaggtttctcagctgcagcagcaacagaagcttgaatcttgggaacaattgatgattgcccaccaactcttttattggttaaagacatgaactttggagaaattctcaagtttgatccaaaat

SEQ ID NO: 2534 - DNA, 200 bp, Euphorbia heterophylla
attttggatcaaacttgagaatttctccaaagttcatgtctttaaccaataaaagagttggtgggcaatcatcaattgttcccaagattcaagcttctgttgctgctgcagctgagaaaccttcatctgtcccagaaattgtgttacaacccatcaaagagatctctggtactgttcaattgcctgggtcaaagtctgtc

SEQ ID NO: 2535 - DNA, 200 bp, Euphorbia heterophylla
gaaattctcaagtttgatccaaaattaagagtttttgaagatttgggtaactgggttttgggtaaagtatggtgcaattgaccagtatggacaccattgttgatggtagtagcttgagccattattcttcctctgaatttggcgttgtttgttggctgaaaaagttaggtggattttaggcttttaagagagagaaggga

SEQ ID NO: 2536 - DNA, 200 bp, Euphorbia heterophylla
tcccttctctctcttaaaagcctaaaatccacctaactttttcagccaacaaacaacgccaaattcagaggaagaataatggctcaagctactaccatcaacaatggtgtccatactggtcaattgcaccatactttacccaaaacccagttacccaaatcttcaaaaactcttaattttggatcaaacttgagaatttc

SEQ ID NO: 2537 - DNA, 200 bp, Euphorbia heterophylla
ttaggcttttaagagagagaagggaaagaagagggcttagttcttaccaaaccaaagttttggtgggcaaagagaaagtgggttggtgtagactctagtagagtagagggaatcattataagagtttgttgttgaattttttaaaagttttttgcattcctccgatttgcaacacggtttacctactgtttatttgaatt

SEQ ID NO: 2538 - DNA, 200 bp, Euphorbia heterophylla
aattcaaataaacagtaggtaaaccgtgttgcaaatcggaggaatgcaaaaaacttttaaaaaattcaacaacaaactcttataatgattccctctactctactagagtctacaccaacccactttctctttgcccaccaaaactttggtttggtaagaactaagccctcttctttcccttctctctcttaaaagcctaa

SEQ ID NO: 2539 - DNA, 200 bp, Euphorbia heterophylla
ggtttacctactgtttatttgaattttttgtgttgagaaaaggcttacaggcttgctcttgtatatgtgtatgtatttgctttgtggttaaatatgctgcatgttgtaatgaaaactctgcccggggatggtgggcttacacgccaaagaaaaagattgttttccacaagcaaaaatatcccattggcaacagcgtgcaa

SEQ ID NO: 2540 - DNA, 200 bp, Euphorbia heterophylla
ttgcacgctgttgccaatgggatatttttgcttgtggaaaacaatctttttctttggcgtgtaagcccaccatccccgggcagagttttcattacaacatgcagcatatttaaccacaaagcaaatacatacacatatacaagagcaagcctgtaagccttttctcaacacaaaaaattcaaataaacagtaggtaaacc

SEQ ID NO: 2541 - DNA, 200 bp, Euphorbia heterophylla
atatcccattggcaacagcgtgcaattatttagggaatggtgttagagcattaaaattggaaaataaatgagctctcattttgttcaaaccatgagaattttcccctggtccaatattcaggcgttttgtttcatttgtaaaaattacgatcatatttctctttagtgaagcaactgattggaaaactttggtatatgcc

SEQ ID NO: 2542 - DNA, 200 bp, Euphorbia heterophylla
ggcatataccaaagttttccaatcagttgcttcactaaagagaaatatgatcgtaatttttacaaatgaaacaaaacgcctgaatattggaccaggggaaaattctcatggtttgaacaaaatgagagctcatttattttccaattttaatgctctaacaccattccctaaataattgcacgctgttgccaatgggatat

SEQ ID NO: 2543 - DNA, 200 bp, Euphorbia heterophylla
tgattggaaaactttggtatatgccatatctttccaagttaaagagttcccaggcatcatcctcaatgatcttcctctatattcctgtacaaatattgttgataggaagttcattcatgccaataacaatatgtctcttgcgaatttctagaagaccagaaatttgttgtgacctgtggagttcttccaaaagtatcctc

SEQ ID NO: 2544 - DNA, 200 bp, Euphorbia heterophylla
gaggatacttttggaagaactccacaggtcacaacaaatttctggtcttctagaaattcgcaagagacatattgttattggcatgaatgaacttcctatcaacaatatttgtacaggaatatagaggaagatcattgaggatgatgcctgggaactctttaacttggaaagatatggcatataccaaagttttccaatca

SEQ ID NO: 2545 - DNA, 200 bp, Euphorbia heterophylla
gtggagttcttccaaaagtatcctctgtgcgacgcatgaaaaaagcctttgggctagactactgagatgcagctgcctggtaattcatgcctctctcccaagagagtacgagaagtcatttatagccgcttaagagagccaaggatcaatttaggcgtgttctatttccatatcttaatgtatcactgaagtttagcaag

SEQ ID NO: 2546 - DNA, 200 bp, Euphorbia heterophylla
cttgctaaacttcagtgatacattaagatatggaaatagaacacgcctaaattgatccttggctctcttaagcggctataaatgacttctcgtactctcttgggagagaggcatgaattaccaggcagctgcatctcagtagtctagcccaaaggcttttttcatgcgtcgcacagaggatacttttggaagaactccac

SEQ ID NO: 2547 - DNA, 200 bp, Euphorbia heterophylla
taatgtatcactgaagtttagcaagtaaacaaacatcacaatccctgatgcttgcatagtcatggcaaatgttatactctttgtttacatatgaaaaaccagatattactccatatttttagaaaccagcaaccaaaggagcttaaatggtccctgctcctaagtcatatctcttggcaatggggtgtttgtagatcttg

SEQ ID NO: 2548 - DNA, 200 bp, Euphorbia heterophylla
caagatctacaaacaccccattgccaagagatatgacttaggagcagggaccatttaagctcctttggttgctggtttctaaaaatatggagtaatatctggtttttcatatgtaaacaaagagtataacatttgccatgactatgcaagcatcagggattgtgatgtttgtttacttgctaaacttcagtgatacatta

SEQ ID NO: 2549 - DNA, 200 bp, Euphorbia heterophylla
ggcaatggggtgtttgtagatcttgagtgctgccagtccacttactgtaatgcaatacatcaatattgagctagtttctcatgggaaaaaaccatagaaatgggacaaatttgatgttaatgttctgtaatccaacttgaggattagttttatcacataaaagctacattgaaagttctattattattttgagtttgcat

SEQ ID NO: 2550 - DNA, 200 bp, Euphorbia heterophylla
atgcaaactcaaaataataatagaactttcaatgtagcttttatgtgataaaactaatcctcaagttggattacagaacattaacatcaaatttgtcccatttctatggttttttcccatgagaaactagctcaatattgatgtattgcattacagtaagtggactggcagcactcaagatctacaaacaccccattgcc

SEQ ID NO: 2551 - DNA, 200 bp, Euphorbia heterophylla
ttctattattattttgagtttgcatcttatgttgtttttcctttgtgattttatccattttcttaactagttattcgtttcctgaagtttttagtgtcataactcctaatcacaatcatgctacagggcacaacagtggtcgacaacttgctgtatagtgatgatattctttatatgttggacgctctcagaactcttgg

SEQ ID NO: 2552 - DNA, 200 bp, Euphorbia heterophylla
ccaagagttctgagagcgtccaacatataaagaatatcatcactatacagcaagttgtcgaccactgttgtgccctgtagcatgattgtgattaggagttatgacactaaaaacttcaggaaacgaataactagttaagaaaatggataaaatcacaaaggaaaaacaacataagatgcaaactcaaaataataatagaa

SEQ ID NO: 2553 - DNA, 200 bp, Euphorbia heterophylla
tgttggacgctctcagaactcttggtttaaaagtggaggatgatagtacagcctaaagggcagtcgtagagggttgtggtggtctgtttcctgttggtaaagatggaaaggaagagattcaactttccttggtaatgcaggaacagcgatgcgcccattgacagctgcggttgccgttgctggaggaaattcaaggtttg

SEQ ID NO: 2554 - DNA, 200 bp, Euphorbia heterophylla
caaaccttgaatttcctccagcaacggcaaccgcagctgtcaatgggcgcatcgctgttcctgcattaccaaggaaagttgaatctcttcctttccatctttaccaacaggaaacagaccaccacaaccctctacgactgccctttaggctgtactatcatcctccacttttaaaccaagagttctgagagcgtccaaca

SEQ ID NO: 2555 - DNA, 200 bp, Euphorbia heterophylla
gttgctggaggaaattcaaggtttgtccaattatattctttatgtgagtgttgttttttgtgttagtttcaatcatgaaggtactaatgcagaagccgtacccctgaaattttcttattttgtatatatcaattggtaattgatgtaagatatttttccgagaggaataaaaacagggggatagagaatattaaagtatt

SEQ ID NO: 2556 - DNA, 200 bp, Euphorbia heterophylla
aatactttaatattctctatccccctgtttttattcctctcggaaaaatatcttacatcaattaccaattgatatatacaaaataagaaaatttcaggggtacggcttctgcattagtaccttcatgattgaaactaacacaaaaaacaacactcacataaagaatataattggacaaaccttgaatttcctccagcaac

SEQ ID NO: 2557 - DNA, 200 bp, Euphorbia heterophylla
gtctaatgaactttgatactataatcaattggtgaatattgtgattttattttttataagataataggtactttatttttcattattgttggattagtgatgtggaattcaaacaatggtagagtagcatataatttttaattatatttattacatttatattatataatctcacaaaatataattataaaaggtgatat

SEQ ID NO: 2558 - DNA, 200 bp, Euphorbia heterophylla
atatcaccttttataattatattttgtgagattatataatataaatgtaataaatataattaaaaattatatgctactctaccattgtttgaattccacatcactaatccaacaataatgaaaaataaagtacctattatcttataaaaaataaaatcacaatattcaccaattgattatagtatcaaagttcattagac

SEQ ID NO: 2559 - DNA, 200 bp, Euphorbia heterophylla
aaaatataattataaaaggtgatatgcttatatatctataataaccactattaatcttggttgttagcaataagagttagtctaagtggtgagtggtttggtatcgcttaagcaaggtcttgtgtttaattctggagtacgcaaaaaattttatcgagagactcacctaccatagttaggtgcgcgacccgtatcgaatc

SEQ ID NO: 2560 - DNA, 200 bp, Euphorbia heterophylla
gattcgatacgggtcgcgcacctaactatggtaggtgagtctctcgataaaattttttgcgtactccagaattaaacacaagaccttgcttaagcgataccaaaccactcaccacttagactaactcttattgctaacaaccaagattaatagtggttattatagatatataagcatatcaccttttataattatatttt

SEQ ID NO: 2561 - DNA, 200 bp, Euphorbia heterophylla
ttaggtgcgcgacccgtatcgaatctggatgtagtcgaaacaaagtttcggtaaatcagatgaacaatcgaagaaagaacctcagcgtttgttgaataagaaattagaaggcttaccaaacacagtattttggttagtattcaaaagcccattttcaatgtccaccgggtccccactaaacctacccactttctatctct

SEQ ID NO: 2562 - DNA, 200 bp, Euphorbia heterophylla
agagatagaaagtgggtaggtttagtggggacccggtggacattgaaaatgggcttttgaatactaaccaaaatactgtgtttggtaagccttctaatttcttattcaacaaacgctgaggttctttcttcgattgttcatctgatttaccgaaactttgtttcgactacatccagattcgatacgggtcgcgcacctaa

SEQ ID NO: 2563 - DNA, 200 bp, Euphorbia heterophylla
ctaaacctacccactttctatctctcaccaaacctgcccttaatggaccaaaatgctgatttggcaaaatctaattggtaagttgctaatcacataataacaaaattgactctatatcttcaaaaccttggctatctaccacgtcccactaccatacgccacttctcaatcttaccaacccctttttctttttggcccca

SEQ ID NO: 2564 - DNA, 200 bp, Euphorbia heterophylla
tggggccaaaaagaaaaaggggttggtaagattgagaagtggcgtatggtagtgggacgtggtagatagccaaggttttgaagatatagagtcaattttgttattatgtgattagcaacttaccaattagattttgccaaatcagcattttggtccattaagggcaggtttggtgagagatagaaagtgggtaggtttag

SEQ ID NO: 2565 - DNA, 200 bp, Euphorbia heterophylla
caacccctttttctttttggccccataatattcttaacatttcaatttagcgatttgagcaagtcaaatcatttttttaatttcatttgtcaaactccattttgaagaatttacagttctttcattctaactatcattctcatttttcatattaaattatcaaaaaataataatattttattattatattaatttatgta

SEQ ID NO: 2566 - DNA, 200 bp, Euphorbia heterophylla
tacataaattaatataataataaaatattattattttttgataatttaatatgaaaaatgagaatgatagttagaatgaaagaactgtaaattcttcaaaatggagtttgacaaatgaaattaaaaaaatgatttgacttgctcaaatcgctaaattgaaatgttaagaatattatggggccaaaaagaaaaaggggttg

SEQ ID NO: 2567 - DNA, 200 bp, Euphorbia heterophylla
ttttattattatattaatttatgtagatcgtttatgttatgttgtactgaactaataaaataattaaaaacatcaaaattcaaacaaagtaataaaataatgattccctgaaatagagaatgcccatatacgagaaaccctcgttttgaagaataccctatggagaatggttggacttaggtcatttttatttagattac

SEQ ID NO: 2568 - DNA, 200 bp, Euphorbia heterophylla
gtaatctaaataaaaatgacctaagtccaaccattctccatagggtattcttcaaaacgagggtttctcgtatatgggcattctctatttcagggaatcattattttattactttgtttgaattttgatgtttttaattattttattagttcagtacaacataacataaacgatctacataaattaatataataataaaa

SEQ ID NO: 2569 - DNA, 200 bp, Euphorbia heterophylla
cttaggtcatttttatttagattactactcaatgtagttcaattcagtaatcaataagaattggtccaagtggtaagcgacttagtatcgctcaggcaaggtctcgagttcgaatcctggtgtatgcaattcggatctggatgtagttggagcaaagctccggtgaaccagatgaataacaaaaaaaatgtaaactttta

SEQ ID NO: 2570 - DNA, 200 bp, Euphorbia heterophylla
taaaagtttacattttttttgttattcatctggttcaccggagctttgctccaactacatccagatccgaattgcatacaccaggattcgaactcgagaccttgcctgagcgatactaagtcgcttaccacttggaccaattcttattgattactgaattgaactacattgagtagtaatctaaataaaaatgacctaag

SEQ ID NO: 2571 - DNA, 200 bp, Euphorbia heterophylla
ataacaaaaaaaatgtaaacttttagttaatatttgttattgtaattgaaaatcaaataaagttgtgggtcaaatttggaaaattgtgaaagattggaataatgaaacacctcaattgtcgttacaataacgcctaaaacctcaccaatctcaaatccagagcagccatttttcttcttccccgttgagaccagcaagaa

SEQ ID NO: 2572 - DNA, 200 bp, Euphorbia heterophylla
ttcttgctggtctcaacggggaagaagaaaaatggctgctctggatttgagattggtgaggttttaggcgttattgtaacgacaattgaggtgtttcattattccaatctttcacaattttccaaatttgacccacaactttatttgattttcaattacaataacaaatattaactaaaagtttacattttttttgttat

SEQ ID NO: 2573 - DNA, 200 bp, Euphorbia heterophylla
tcttccccgttgagaccagcaagaatcagagatacacggagattggtggagggggatcctgtagctctagttaaatggcacaagttagcaaattctgcaatggagttcaaaaaacctccattttccccaattttcctaaacccgaaacccccaaatccgttccttcgttttcaatcaggtcaagttttaacgggtcgccg

SEQ ID NO: 2574 - DNA, 200 bp, Euphorbia heterophylla
cggcgacccgttaaaacttgacctgattgaaaacgaaggaacggatttgggggtttcgggtttaggaaaattggggaaaatggaggttttttgaactccattgcagaatttgctaacttgtgccatttaactagagctacaggatccccctccaccaatctccgtgtatctctgattcttgctggtctcaacggggaaga

SEQ ID NO: 2575 - DNA, 200 bp, Euphorbia heterophylla
caggtcaagttttaacgggtcgccggtttcatcgggtctaaatcggcgccgaacaaagggcgattgtattgttgttaaaggtaaagctagttcgtttaaagtttcagcttcagtagccacaacagagaaaccctctacttcaccggagatcgtgttgcaaccaattaaagaaatctccggcactgtcactttgccgggtt

SEQ ID NO: 2576 - DNA, 200 bp, Euphorbia heterophylla
aacccggcaaagtgacagtgccggagatttctttaattggttgcaacacgatctccggtgaagtagagggtttctctgttgtggctactgaagctgaaactttaaacgaactagctttacctttaacaacaatacaatcgccctttgttcggcgccgatttagacccgatgaaaccggcgacccgttaaaacttgacctg

SEQ ID NO: 2577 - DNA, 200 bp, Euphorbia heterophylla
tccggcactgtcactttgccgggttctaagtcgctgtccaatcggattcttctcctcgctgctttatctgaggtatgaattgttctggatttttcggcgattgcattctgtgccgttgaattgtaagctgcggttttagtataatcataattagatgaagcagaaaggaacttagttcttttgcattttatgttcagaat

SEQ ID NO: 2578 - DNA, 200 bp, Euphorbia heterophylla
attctgaacataaaatgcaaaagaactaagttcctttctgcttcatctaattatgattatactaaaaccgcagcttacaattcaacggcacagaatgcaatcgccgaaaaatccagaacaattcatacctcagataaagcagcgaggagaagaatccgattggacagcgacttagaacccggcaaagtgacagtgccgga

SEQ ID NO: 2579 - DNA, 200 bp, Euphorbia heterophylla
ttcttttgcattttatgttcagaatcacatagatcactaattgttggggaaatctggaaatgaaggctagataaatatgaagttatagcgaacattgtgattgaaacttattgacaagaacttagaacgaatgttgttgtgatgttatgaaacaaaaaagtctgtaaaacgttatatttgccaatgcgttctctctatat

SEQ ID NO: 2580 - DNA, 200 bp, Euphorbia heterophylla
atatagagagaacgcattggcaaatataacgttttacagacttttttgtttcataacatcacaacaacattcgttctaagttcttgtcaataagtttcaatcacaatgttcgctataacttcatatttatctagccttcatttccagatttccccaacaattagtgatctatgtgattctgaacataaaatgcaaaagaa

SEQ ID NO: 2581 - DNA, 200 bp, Euphorbia heterophylla
atttgccaatgcgttctctctatatatatatatagagaaccgaaataaccgtcatatgttaactgtttttgtagttattttcgtctaagtcgcgacatggtccaaatcccaaattcatgaattttccaagggaacttttactttagctcgaccccagtttggggcactacccccgaaatccgaacattgaacttgaacaa

SEQ ID NO: 2582 - DNA, 200 bp, Euphorbia heterophylla
ttgttcaagttcaatgttcggatttcgggggtagtgccccaaactggggtcgagctaaagtaaaagttcccttggaaaattcatgaatttgggatttggaccatgtcgcgacttagacgaaaataactacaaaaacagttaacatatgacggttatttcggttctctatatatatatatagagagaacgcattggcaaat

SEQ ID NO: 2583 - DNA, 200 bp, Euphorbia heterophylla
aaatccgaacattgaacttgaacaaagcatgcactccacactctcgtgacttgttcaatgaaatatcacaatcgcacaactagttgatctaattacactaaaatactactaacaacacttaatcaacagtctatcatgttgttggtttttctttgaacttctgaagcaggatagataaagatcgttccttcccactaatt

SEQ ID NO: 2584 - DNA, 200 bp, Euphorbia heterophylla
aattagtgggaaggaacgatctttatctatcctgcttcagaagttcaaagaaaaaccaacaacatgatagactgttgattaagtgttgttagtagtattttagtgtaattagatcaactagttgtgcgattgtgatatttcattgaacaagtcacgagagtgtggagtgcatgctttgttcaagttcaatgttcggattt

SEQ ID NO: 2585 - DNA, 200 bp, Euphorbia heterophylla
taaagatcgttccttcccactaattgatactatcattgcattgacctttaaattatcttcttttggtgcatatagattacagatttagttaaatcacgtaaagtttgggctgaatttttgttaaaataaacttcaaatttgaaatctttactaatttttcagtccctaggtttccatatcccctttatttctaaaagccg

SEQ ID NO: 2586 - DNA, 200 bp, Euphorbia heterophylla
cggcttttagaaataaaggggatatggaaacctagggactgaaaaattagtaaagatttcaaatttgaagtttattttaacaaaaattcagcccaaactttacgtgatttaactaaatctgtaatctatatgcaccaaaagaagataatttaaaggtcaatgcaatgatagtatcaattagtgggaaggaacgatcttta

SEQ ID NO: 2587 - DNA, 200 bp, Euphorbia heterophylla
atatcccctttatttctaaaagccgttgttttgttggcatgccttataattgatttttgtttatttcttgcaataaacaacttaaaaactctggccttggaagcctttttatctgtgtaaagtagtgattctgagtgttctacgttcaaaattttgcttctcgagaccataaaacggtgctttacatctattgtccaggg

SEQ ID NO: 2588 - DNA, 200 bp, Euphorbia heterophylla
ccctggacaatagatgtaaagcaccgttttatggtctcgagaagcaaaattttgaacgtagaacactcagaatcactactttacacagataaaaaggcttccaaggccagagtttttaagttgtttattgcaagaaataaacaaaaatcaattataaggcatgccaacaaaacaacggcttttagaaataaaggggatat

SEQ ID NO: 2589 - DNA, 200 bp, Euphorbia heterophylla
ggtgctttacatctattgtccagggcacaactgttgtggacaacttactaaacagcgatgatgttcattacatgcttggcgcacttaaaacattaggactacgagtagaagacaatagtgaactcaaacaagctattgtggaaggttgtggcggtcaattcccagtgggtaaagagtcaaagaaagacattcaacttttt

SEQ ID NO: 2590 - DNA, 200 bp, Euphorbia heterophylla
aaaaagttgaatgtctttctttgactctttacccactgggaattgaccgccacaaccttccacaatagcttgtttgagttcactattgtcttctactcgtagtcctaatgttttaagtgcgccaagcatgtaatgaacatcatcgctgtttagtaagttgtccacaacagttgtgccctggacaatagatgtaaagcacc

SEQ ID NO: 2591 - DNA, 200 bp, Euphorbia heterophylla
gtcaaagaaagacattcaactttttctcggaaatgcaggaactgcaatgcgtcctttgactgctgcagttactgcagccggtggaaattctaggtttacttttccccctttttttaccctctttagacatgccttgctttatagaacaataagcacttattttccacgacttatgagattctatatggtttaacatgtat

SEQ ID NO: 2592 - DNA, 200 bp, Euphorbia heterophylla
atacatgttaaaccatatagaatctcataagtcgtggaaaataagtgcttattgttctataaagcaaggcatgtctaaagagggtaaaaaaagggggaaaagtaaacctagaatttccaccggctgcagtaactgcagcagtcaaaggacgcattgcagttcctgcatttccgagaaaaagttgaatgtctttctttgac

SEQ ID NO: 2593 - DNA, 200 bp, Euphorbia heterophylla
agattctatatggtttaacatgtatctaatgtgtttcagctacatacttgatggggtgccacgaatgagagagagaccaattggggatttggtaaccggtcttaagcagcttggagccgacgtcaattgctcgtccacaaactgcccccctgttcatgtaaacgcaaatggcggccttcctgggggaaaggtataaatat

SEQ ID NO: 2594 - DNA, 200 bp, Euphorbia heterophylla
atatttatacctttcccccaggaaggccgccatttgcgtttacatgaacaggggggcagtttgtggacgagcaattgacgtcggctccaagctgcttaagaccggttaccaaatccccaattggtctctctctcattcgtggcaccccatcaagtatgtagctgaaacacattagatacatgttaaaccatatagaatct

SEQ ID NO: 2595 - DNA, 200 bp, Euphorbia heterophylla
cttcctgggggaaaggtataaatatatcatctcattaagtaaatacgaaagaacaagttttcctcttgttttgactagatccatcattattgtatcccttttaggttaagctctcaggatcaattagtagccaatacttgactgctttgctcatggcagctcctttggctctgggagatgtagaaatcgagattatcgat

SEQ ID NO: 2596 - DNA, 200 bp, Euphorbia heterophylla
atcgataatctcgatttctacatctcccagagccaaaggagctgccatgagcaaagcagtcaagtattggctactaattgatcctgagagcttaacctaaaagggatacaataatgatggatctagtcaaaacaagaggaaaacttgttctttcgtatttacttaatgagatgatatatttatacctttcccccaggaag

SEQ ID NO: 2597 - DNA, 200 bp, Euphorbia heterophylla
agatgtagaaatcgagattatcgataaactgatttcgattccttacgttgagatgactttaaagctaatggaacgctacggtgtttctgtacaacacagtaatagctgggatcgtttcttcatcccaggaggtcaaaagtacaagtaggtatttttatcgatttacgaattaggaaaccctagattctttcaaacaaaaa

SEQ ID NO: 2598 - DNA, 200 bp, Euphorbia heterophylla
tttttgtttgaaagaatctagggtttcctaattcgtaaatcgataaaaatacctacttgtacttttgacctcctgggatgaagaaacgatcccagctattactgtgttgtacagaaacaccgtagcgttccattagctttaaagtcatctcaacgtaaggaatcgaaatcagtttatcgataatctcgatttctacatct

SEQ ID NO: 2599 - DNA, 200 bp, Euphorbia heterophylla
aaccctagattctttcaaacaaaaaacgaaaaccttaaatgtcaatcaggtccccgggaaattcatatgtcgaaggcgatgcctcgagtgccagttatttcctggcaggtgcagcaattaccggtggaactatcactgtagaaggttgtggcacttccagtttacaggtattttttaaaatttcagattttttttcgtat

SEQ ID NO: 2600 - DNA, 200 bp, Euphorbia heterophylla
atacgaaaaaaaatctgaaattttaaaaaatacctgtaaactggaagtgccacaaccttctacagtgatagttccaccggtaattgctgcacctgccaggaaataactggcactcgaggcatcgccttcgacatatgaatttcccggggacctgattgacatttaaggttttcgttttttgtttgaaagaatctagggtt

SEQ ID NO: 2601 - DNA, 200 bp, Euphorbia heterophylla
taaaatttcagattttttttcgtattagggatacaaagtaacttgtgattggctgcttgttctatatgaaaattaagggagatgtaaagttcgctgaggttttagaaaagatgggagcaaaagttagctggacggagaacagtgttacagtgactgggccaccacgaaattctcctcgtgacaagcacttgcgtgccatc

SEQ ID NO: 2602 - DNA, 200 bp, Euphorbia heterophylla
gatggcacgcaagtgcttgtcacgaggagaatttcgtggtggcccagtcactgtaacactgttctccgtccagctaacttttgctcccatcttttctaaaacctcagcgaactttacatctcccttaattttcatatagaacaagcagccaatcacaagttactttgtatccctaatacgaaaaaaaatctgaaatttta

SEQ ID NO: 2603 - DNA, 200 bp, Euphorbia heterophylla
tcgtgacaagcacttgcgtgccatcgatgtgaacatgaacaaaatgccagatgtcgctatgacattggctgtggttgcgcttttcgctgatggccccactgccataagagacggtaacttcgttcaatcttctcgtgaaaataataattaatattcttcaaataatctgaaaggacattttcttgattccagtggcaagt

SEQ ID NO: 2604 - DNA, 200 bp, Euphorbia heterophylla
acttgccactggaatcaagaaaatgtcctttcagattatttgaagaatattaattattattttcacgagaagattgaacgaagttaccgtctcttatggcagtggggccatcagcgaaaagcgcaaccacagccaatgtcatagcgacatctggcattttgttcatgttcacatcgatggcacgcaagtgcttgtcacga

SEQ ID NO: 2605 - DNA, 200 bp, Euphorbia heterophylla
cattttcttgattccagtggcaagttggagagtgaaagaaaccgaaaggatgattgctgtttgcacagaactaagaaaggttagttgctgataaatttcggctattaacaaaacaaaacctatcggcatataattataagagttaacttcaaaaacataacctgtggtttcacttatttttaaaagggggtctgtgaaat

SEQ ID NO: 2606 - DNA, 200 bp, Euphorbia heterophylla
atttcacagacccccttttaaaaataagtgaaaccacaggttatgtttttgaagttaactcttataattatatgccgataggttttgttttgttaatagccgaaatttatcagcaactaacctttcttagttctgtgcaaacagcaatcatcctttcggtttctttcactctccaacttgccactggaatcaagaaaatg

SEQ ID NO: 2607 - DNA, 200 bp, Euphorbia heterophylla
gtgtgaattagttaaaaagaccattatttctagacgaagggaatattaagtaagaaaaagggaaaagcaaaaaaatataaggaccaatcaaagacctagaaaaagctaaaaatagtgccaatacattgtagtatagatacaaataaaaataattcacattactcatttatattaccttaaagtatgattagtgtcacaat

SEQ ID NO: 2608 - DNA, 200 bp, Euphorbia heterophylla
attgtgacactaatcatactttaaggtaatataaatgagtaatgtgaattatttttatttgtatctatactacaatgtattggcactatttttagctttttctaggtctttgattggtccttatatttttttgcttttccctttttcttacttaatattcccttcgtctagaaataatggtctttttaactaattcacac

SEQ ID NO: 2609 - DNA, 200 bp, Euphorbia heterophylla
tattcagttaggagcaacagtagaggaaggagcagattactgtgtgataactccgccggaaaaactaaatataacggagattgacacttacgatgatcaccgaatggcgatggccttctctcttgctgcctgtggggatgttccggtcactattaaagatcccggttgtactcgaaaaactttccccgactattttcaag

SEQ ID NO: 2610 - DNA, 200 bp, Euphorbia heterophylla
cttgaaaatagtcggggaaagtttttcgagtacaaccgggatctttaatagtgaccggaacatccccacaggcagcaagagagaaggccatcgccattcggtgatcatcgtaagtgtcaatctccgttatatttagtttttccggcggagttatcacacagtaatctgctccttcctctactgttgctcctaactgaata

SEQ ID NO: 2611 - DNA, 200 bp, Euphorbia heterophylla
aaaactttccccgactattttcaagtcctccaaagctttactaagcaatgaccacgaacccctgaaactttactagaattggatcaggctcttatattcaatggatcattcaagtgagtttatgttattaatgtgccgggcataacagattttttataccggatgaatttgtattttatgttttgtatttgtattctatc

SEQ ID NO: 2612 - DNA, 200 bp, Euphorbia heterophylla
gatagaatacaaatacaaaacataaaatacaaattcatccggtataaaaaatctgttatgcccggcacattaataacataaactcacttgaatgatccattgaatataagagcctgatccaattctagtaaagtttcaggggttcgtggtcattgcttagtaaagctttggaggacttgaaaatagtcggggaaagtttt

SEQ ID NO: 2613 - DNA, 200 bp, Euphorbia heterophylla
ttatgttttgtatttgtattctatcaagttgatcagcaataaatggatgaatgtgttaatttttgtgatttacttaaggtgttattaatcagttcgaccggttttaggtgaaccggctatggtctcggagtgatttagttaaaaattgggttgaataggaagaatcaaacccttatggcaaaaagaaaatgtcatgttaa

SEQ ID NO: 2614 - DNA, 200 bp, Euphorbia heterophylla
ttaacatgacattttctttttgccataagggtttgattcttcctattcaacccaatttttaactaaatcactccgagaccatagccggttcacctaaaaccggtcgaactgattaataacaccttaagtaaatcacaaaaattaacacattcatccatttattgctgatcaacttgatagaatacaaatacaaaacataa

SEQ ID NO: 2615 - DNA, 200 bp, Euphorbia heterophylla
tggcaaaaagaaaatgtcatgttaaacacataggaatgcgttgtaatagccctttatgttttattcaaaattcctctggtaacatgcagaatgttgcaaaggacctagaaagcagttaaatagccacttgaaaccataaattctctctctatatatattcttttaagataaaaaatcggtaaaattagcaatcatgtcaa

SEQ ID NO: 2616 - DNA, 200 bp, Euphorbia heterophylla
ttgacatgattgctaattttaccgattttttatcttaaaagaatatatatagagagagaatttatggtttcaagtggctatttaactgctttctaggtcctttgcaacattctgcatgttaccagaggaattttgaataaaacataaagggctattacaacgcattcctatgtgtttaacatgacattttctttttgcca

SEQ ID NO: 2617 - DNA, 200 bp, Euphorbia heterophylla
tcggtaaaattagcaatcatgtcaataatattgattatactacatatcattaacttcacgtttcacgagtatgaagtttggtttgatattgataacaatgtgtacttattgaaagggaattataaaaatgacttggataatatctaaagttgtaataatactttcaaatagaaacgaagttgatggttttcccaaaattt

SEQ ID NO: 2618 - DNA, 200 bp, Euphorbia heterophylla
aaattttgggaaaaccatcaacttcgtttctatttgaaagtattattacaactttagatattatccaagtcatttttataattccctttcaataagtacacattgttatcaatatcaaaccaaacttcatactcgtgaaacgtgaagttaatgatatgtagtataatcaatattattgacatgattgctaattttaccga

SEQ ID NO: 2619 - DNA, 200 bp, Euphorbia heterophylla
gaagttgatggttttcccaaaatttttagttgaataaaatcaaagtaaaatcatgaacttagaataaattttcattgtgtaaaaaaatgaaccaataacaatcgttgctgaaaatatcctataagtgttgccaatgccagatttttataaacctggaatgagcatttgcaatgctttgaagacaaagagttgctaaaagg

SEQ ID NO: 2620 - DNA, 200 bp, Euphorbia heterophylla
ccttttagcaactctttgtcttcaaagcattgcaaatgctcattccaggtttataaaaatctggcattggcaacacttataggatattttcagcaacgattgttattggttcatttttttacacaatgaaaatttattctaagttcatgattttactttgattttattcaactaaaaattttgggaaaaccatcaacttc

SEQ ID NO: 2621 - DNA, 200 bp, Euphorbia heterophylla
ttgaagacaaagagttgctaaaaggcgtgtccattagatcaattgcatctgtttataacaaaaacattgcaaaatggcatgtccattcgagcagttgcaataattcataacaaaagtgttgcgaaatgtagcttccggctctcataagctaagtgtcgtaatagaattcgaacaagcatgcacttcctgctctcctgact

SEQ ID NO: 2622 - DNA, 200 bp, Euphorbia heterophylla
agtcaggagagcaggaagtgcatgcttgttcgaattctattacgacacttagcttatgagagccggaagctacatttcgcaacacttttgttatgaattattgcaactgctcgaatggacatgccattttgcaatgtttttgttataaacagatgcaattgatctaatggacacgccttttagcaactctttgtcttcaa

SEQ ID NO: 2623 - DNA, 200 bp, Euphorbia heterophylla
tcaaccaaatgatccttttcttttattttctctaagtaaaccccaattaattgcaatttttgatgaactctgttcagaaaaaccgaaatttagtcgaaatgttttcactttcagttctgaaaattcagtttttaggtgtaattcggttcggttcggttcggtaagcatttttagataactcagctgggttattcggttta

SEQ ID NO: 2624 - DNA, 200 bp, Euphorbia heterophylla
taaaccgaataacccagctgagttatctaaaaatgcttaccgaaccgaaccgaaccgaattacacctaaaaactgaattttcagaactgaaagtgaaaacatttcgactaaatttcggtttttctgaacagagttcatcaaaaattgcaattaattggggtttacttagagaaaataaaagaaaaggatcatttggttga

SEQ ID NO: 2625 - DNA, 200 bp, Euphorbia heterophylla
taactcagctgggttattcggtttagttcagccaaatgctaaacccctggcccctattgagctctttcctctaaatttttctaattggaattaactatcaaatgtgtttcagctacatacttgatggggtgccacgaatgagagagagaccaattggggatttggtaaccggtcttaagcagcttggagccgacgtcaat

SEQ ID NO: 2626 - DNA, 200 bp, Euphorbia heterophylla
attgacgtcggctccaagctgcttaagaccggttaccaaatccccaattggtctctctctcattcgtggcaccccatcaagtatgtagctgaaacacatttgatagttaattccaattagaaaaatttagaggaaagagctcaataggggccaggggtttagcatttggctgaactaaaccgaataacccagctgagtta

SEQ ID NO: 2627 - DNA, 200 bp, Euphorbia heterophylla
taagcagcttggagccgacgtcaattgctcgtccacaaactgcccccctgttcatgtaaacgcaaatggcggccttcctgggggaaaggtataatatatagtctcattaagtaaatatgaaagaacaagttttcctcttgttttgactagatccatcattattgtatcccttttaggttaagctctcaggatcaattagt

SEQ ID NO: 2628 - DNA, 200 bp, Euphorbia heterophylla
actaattgatcctgagagcttaacctaaaagggatacaataatgatggatctagtcaaaacaagaggaaaacttgttctttcatatttacttaatgagactatatattatacctttcccccaggaaggccgccatttgcgtttacatgaacaggggggcagtttgtggacgagcaattgacgtcggctccaagctgctta

SEQ ID NO: 2629 - DNA, 200 bp, Euphorbia heterophylla
ggttaagctctcaggatcaattagtagccaatacttgactgctttgctcatggcagctcccctggctcttggagatgtagaaatcgagattatcgataaactaatttccattccttacgttgagatgactttgaagttaatggaacgttacggtgtttctgtaaaacacactagtagctgggatcgtttcttcattcaaa

SEQ ID NO: 2630 - DNA, 200 bp, Euphorbia heterophylla
tttgaatgaagaaacgatcccagctactagtgtgttttacagaaacaccgtaacgttccattaacttcaaagtcatctcaacgtaaggaatggaaattagtttatcgataatctcgatttctacatctccaagagccaggggagctgccatgagcaaagcagtcaagtattggctactaattgatcctgagagcttaacc

SEQ ID NO: 2631 - DNA, 200 bp, Euphorbia heterophylla
agctgggatcgtttcttcattcaaagaggtcaaaagtacaagtaggtattttcgttgatttacgaattccgaaaccctcgattttcgttcaaacaaaaaaatgaaaacccggaatgtcaattaggtccccgggaaattcatatgttgaaggcgatgcctcgagtgccagttatttcctggccggtgcagcaatcactggt

SEQ ID NO: 2632 - DNA, 200 bp, Euphorbia heterophylla
accagtgattgctgcaccggccaggaaataactggcactcgaggcatcgccttcaacatatgaatttcccggggacctaattgacattccgggttttcatttttttgtttgaacgaaaatcgagggtttcggaattcgtaaatcaacgaaaatacctacttgtacttttgacctctttgaatgaagaaacgatcccagct

SEQ ID NO: 2633 - DNA, 200 bp, Euphorbia heterophylla
cctggccggtgcagcaatcactggtggaactatcactgtagaaggttgtggcacaactagtttacaggtattttttgtagttattgctttgtgttggttaaactttcagaatttttttcgtattagggatacaaagtgacttgttatatgaaatttcagggagatgtgaagtttgccgaggttttagagaagatgggagc

SEQ ID NO: 2634 - DNA, 200 bp, Euphorbia heterophylla
gctcccatcttctctaaaacctcggcaaacttcacatctccctgaaatttcatataacaagtcactttgtatccctaatacgaaaaaaattctgaaagtttaaccaacacaaagcaataactacaaaaaatacctgtaaactagttgtgccacaaccttctacagtgatagttccaccagtgattgctgcaccggccagg

SEQ ID NO: 2635 - DNA, 200 bp, Euphorbia heterophylla
ccgaggttttagagaagatgggagcaaaagttagctggacagagaatagtgttacagtgactgggccaccacgaaattctcctcgtgacaagcacttgcgtgccatcgatgtgaacatgaacaaaatgccagatgtcgctatgacattggctgtcgttgcgcttttcgctgatggccctactgccataagagacggtaac

SEQ ID NO: 2636 - DNA, 200 bp, Euphorbia heterophylla
gttaccgtctcttatggcagtagggccatcagcgaaaagcgcaacgacagccaatgtcatagcgacatctggcattttgttcatgttcacatcgatggcacgcaagtgcttgtcacgaggagaatttcgtggtggcccagtcactgtaacactattctctgtccagctaacttttgctcccatcttctctaaaacctcgg

SEQ ID NO: 2637 - DNA, 200 bp, Euphorbia heterophylla
tctagagacggtattaactcctttctgatacattacacttttcttgtgctatatattgtttcaaatttgataattcgatcatgcttcaaattttgcacacagccgtaatccatggttataaaatgactatgacacttgtcttgttactgaaaagtgcatacagtaacaaagctgatgttacttcttagtttactctaata

SEQ ID NO: 2638 - DNA, 200 bp, Euphorbia heterophylla
tattagagtaaactaagaagtaacatcagctttgttactgtatgcacttttcagtaacaagacaagtgtcatagtcattttataaccatggattacggctgtgtgcaaaatttgaagcatgatcgaattatcaaatttgaaacaatatatagcacaagaaaagtgtaatgtatcagaaaggagttaataccgtctctaga

SEQ ID NO: 2639 - DNA, 200 bp, Euphorbia heterophylla
tgttacttcttagtttactctaataatggttggacggtcactggcgcacatccccatggttggaagttgtgaatattgttgtcataatggcttatggagcatcttttggtacacttcaggagtaaaagaccactagtccagtatagggttaatcacctctagaactagttagtcacatatactcggaaaattattcatat

SEQ ID NO: 2640 - DNA, 200 bp, Euphorbia heterophylla
atatgaataattttccgagtatatgtgactaactagttctagaggtgattaaccctatactggactagtggtcttttactcctgaagtgtaccaaaagatgctccataagccattatgacaacaatattcacaacttccaaccatggggatgtgcgccagtgaccgtccaaccattattagagtaaactaagaagtaaca

SEQ ID NO: 2641 - DNA, 200 bp, Euphorbia heterophylla
catatactcggaaaattattcatattttgtggttacatgcgttcgtttatctgcatcttgcctagtgtctcctcttgaaatcattcatatatgttctttttttccccttcatctgttacatgttcaaaatatgcttacaacgaaattgggtaacttgaccagttgctagctggagagtgaaggaaacagaaaggatgatt

SEQ ID NO: 2642 - DNA, 200 bp, Euphorbia heterophylla
aatcatcctttctgtttccttcactctccagctagcaactggtcaagttacccaatttcgttgtaagcatattttgaacatgtaacagatgaaggggaaaaaaagaacatatatgaatgatttcaagaggagacactaggcaagatgcagataaacgaacgcatgtaaccacaaaatatgaataattttccgagtatatg

SEQ ID NO: 2643 - DNA, 200 bp, Euphorbia heterophylla
ttatattagctaaaatttggtagtctttgaaatttaaactcaaaagcttgacatgttttttgtaggtcctcttggacagggaattgccaatgctgttggtttagcccttgcagagaagcacttggcagctcgattcaacaaaccagacaacgaaattgttgaccactacacgtatgataacctcctctataattatgtta

SEQ ID NO: 2644 - DNA, 200 bp, Euphorbia heterophylla
taacataattatagaggaggttatcatacgtgtagtggtcaacaatttcgttgtctggtttgttgaatcgagctgccaagtgcttctctgcaagggctaaaccaacagcattggcaattccctgtccaagaggacctacaaaaaacatgtcaagcttttgagtttaaatttcaaagactaccaaattttagctaatataa

SEQ ID NO: 2645 - DNA, 200 bp, Euphorbia heterophylla
gataacctcctctataattatgttactttgtgttgttttgtttaatgctagattaatgtgacatgctgtaatttaatattgttctgtgtttatctttttgttagatattgtatattgggagatggttgtcaaatggaaggaattgcaaatgaagcttgttcccttgctggacattgggggcttggaaagcttattgcttt

SEQ ID NO: 2646 - DNA, 200 bp, Euphorbia heterophylla
aaagcaataagctttccaagcccccaatgtccagcaagggaacaagcttcatttgcaattccttccatttgacaaccatctcccaatatacaatatctaacaaaaagataaacacagaacaatattaaattacagcatgtcacattaatctagcattaaacaaaacaacacaaagtaacataattatagaggaggttatc

SEQ ID NO: 2647 - DNA, 200 bp, Kochia scoparia
atggctcaagctaccacctttaacaatggtgtcaaaaatggtcatcaattatgcgccaatttaccaaaaacccacttgcccaaatctcaaaaagctgtcaaatttggatcaaacttgagattttctccaaagttgaagtctttcaacaatgaaagagtttctgggaaatcatcagttgtttttaaggttcatgcttcagt

SEQ ID NO: 2648 - DNA, 200 bp, Kochia scoparia
actgaagcatgaaccttaaaaacaactgatgatttcccagaaactctttcattgttgaaagacttcaactttggagaaaatctcaagtttgatccaaatttgacagctttttgagatttgggcaagtgggtttttggtaaattggcgcataattgatgaccatttttgacaccattgttaaaggtggtagcttgagccat

SEQ ID NO: 2649 - DNA, 200 bp, Kochia scoparia
ttgtttttaaggttcatgcttcagttgctgctgctccctcaacttccccagaaattgtgttgcaacccattaaggagatttctggcactgttcaattgcctggttctaagtctttatctaatcgaattcttcttttagctgctctttctgagggtacaacagtacttgacaacttgctatatagtgatgatattcgctat

SEQ ID NO: 2650 - DNA, 200 bp, Kochia scoparia
atagcgaatatcatcactatatagcaagttgtcaagtactgttgtaccctcagaaagagcagctaaaagaagaattcgattagataaagacttagaaccaggcaattgaacagtgccagaaatctccttaatgggttgcaacacaatttctggggaagttgagggagcagcagcaactgaagcatgaaccttaaaaacaa

SEQ ID NO: 2651 - DNA, 200 bp, Kochia scoparia
gctatatagtgatgatattcgctatatgttggatgctctaagaactcttgggctcaacgtagaggatgataataaggccaaaagggcaatcgtggagggttgtggcggtctatttcctgctggtaaagagaataggagtgagattgaacttttccttggaaacgcgggaacggcaatgcgcccattgacagctgcagttg

SEQ ID NO: 2652 - DNA, 200 bp, Kochia scoparia
caactgcagctgtcaatgggcgcattgccgttcccgcgtttccaaggaaaagttcaatctcactcctattctctttaccagcaggaaatagaccgccacaaccctccacgattgcccttttggccttattatcatcctctacgttgagcccaagagttcttagagcatccaacatatagcgaatatcatcactatatagc

SEQ ID NO: 2653 - DNA, 200 bp, Kochia scoparia
atgcgcccattgacagctgcagttgccgttgctggaggaaattccagttatgtacttgatggagtgccaagaatgagggagcgacccattggggatctggtagctggtctgaagcaactgggtgcagatgttgactgttttcttggcacaaattgtcctcctgtaagagtaaatgctaaaggaggtcttccagggggcaa

SEQ ID NO: 2654 - DNA, 200 bp, Kochia scoparia
ttgccccctggaagacctcctttagcatttactcttacaggaggacaatttgtgccaagaaaacagtcaacatctgcacccagttgcttcagaccagctaccagatccccaatgggtcgctccctcattcttggcactccatcaagtacataactggaatttcctccagcaacggcaactgcagctgtcaatgggcgcat

SEQ ID NO: 2655 - DNA, 200 bp, Kochia scoparia
ctaaaggaggtcttccagggggcaaggtcaagctctcaggatcagttagtagccaatatcttactgcgctactcatggctacccctttggctcttggagatgtggaggttgaaatcattgataaattgatttctgtcccttacgtagagatgacaataaagttaatggaacggtttggagtgtcaatagagcatactgct

SEQ ID NO: 2656 - DNA, 200 bp, Kochia scoparia
agcagtatgctctattgacactccaaaccgttccattaactttattgtcatctctacgtaagggacagaaatcaatttatcaatgatttcaacctccacatctccaagagccaaaggggtagccatgagtagcgcagtaagatattggctactaactgatcctgagagcttgaccttgccccctggaagacctcctttag

SEQ ID NO: 2657 - DNA, 200 bp, Kochia scoparia
tggagtgtcaatagagcatactgctagctgggacaggtttttgatccgaggtggtcagaagtacaaatctcctggaaatgcatttgttgagggtgatgcttcaagtgccagttacttcttagcaggggccgcgatcactggtgggactgtgactgttgagggttgtggaacaagcagtttgcagggtgatgttaaattcg

SEQ ID NO: 2658 - DNA, 200 bp, Kochia scoparia
cgaatttaacatcaccctgcaaactgcttgttccacaaccctcaacagtcacagtcccaccagtgatcgcggcccctgctaagaagtaactggcacttgaagcatcaccctcaacaaatgcatttccaggagatttgtacttctgaccacctcggatcaaaaacctgtcccagctagcagtatgctctattgacactcca

SEQ ID NO: 2659 - DNA, 200 bp, Kochia scoparia
agtttgcagggtgatgttaaattcgcggaggttcttgagaagatgggttgcaaagttacatggacagagaccagtgtcactgtaactggaccgcccagggactcatctggaagaaaacatttgcgtgccatcgatgttaacatgaacaaaatgccagatgttgcgatgactcttgctgttgttgccctatatgcagatgg

SEQ ID NO: 2660 - DNA, 200 bp, Kochia scoparia
ccatctgcatatagggcaacaacagcaagagtcatcgcaacatctggcattttgttcatgttaacatcgatggcacgcaaatgttttcttccagatgagtccctgggcggtccagttacagtgacactggtctctgtccatgtaactttgcaacccatcttctcaagaacctccgcgaatttaacatcaccctgcaaact

SEQ ID NO: 2661 - DNA, 200 bp, Kochia scoparia
ctgttgttgccctatatgcagatgggcccacagctatcagagacgttgctagctggagagtgaaggaaacagaaaggatgattgccatctgtacagaactcagaaagcttggagcaacagttgaggaaggacctgattactgtgtgatcactccaccagaaaaactaaacgtaaccgccatcgacacatatgatgatcat

SEQ ID NO: 2662 - DNA, 200 bp, Kochia scoparia
atgatcatcatatgtgtcgatggcggttacgtttagtttttctggtggagtgatcacacagtaatcaggtccttcctcaactgttgctccaagctttctgagttctgtacagatggcaatcatcctttctgtttccttcactctccagctagcaacgtctctgatagctgtgggcccatctgcatatagggcaacaacag

SEQ ID NO: 2663 - DNA, 200 bp, Kochia scoparia
attttatttacaattttgccatttatttttttcttttttggttttatttaccaaaatgtcactagattgacaacttttatcaatccactggattgactaagaatttttcgtgagcgatagttcggtagatagaaattttcttttgatctcgagaaattttaggatcgattttcatttttgatccacccttgtgactcttt

SEQ ID NO: 2664 - DNA, 200 bp, Kochia scoparia
aaagagtcacaagggtggatcaaaaatgaaaatcgatcctaaaatttctcgagatcaaaagaaaatttctatctaccgaactatcgctcacgaaaaattcttagtcaatccagtggattgataaaagttgtcaatctagtgacattttggtaaataaaaccaaaaaagaaaaaaataaatggcaaaattgtaaataaaat

SEQ ID NO: 2665 - DNA, 200 bp, Kochia scoparia
ttttgatccacccttgtgactctttaaaaatatatattaaaaaaatgtataataacgcccaccttatttaggaaaacaaagtggatctttttctgttttattttaaaccgtgccctgtatctgtgtgtgtgaccattatttggcctcaattttgaacttctccgagtagttgttaatacttagcatttgggacctgcaat

SEQ ID NO: 2666 - DNA, 200 bp, Kochia scoparia
attgcaggtcccaaatgctaagtattaacaactactcggagaagttcaaaattgaggccaaataatggtcacacacacagatacagggcacggtttaaaataaaacagaaaaagatccactttgttttcctaaataaggtgggcgttattatacatttttttaatatatatttttaaagagtcacaagggtggatcaaaa

SEQ ID NO: 2667 - DNA, 200 bp, Kochia scoparia
atacttagcatttgggacctgcaatgtttaggttttaggatctgcaatgtccggtggtggggaagcctcattgaatggggaaagatgtactggtaatgtagatggtccttacagtgactcttcaccaaggaatgatacaaaccctaagccttcttgtgatgctaatgttccaactgtattagatggtcaagtcggtggtg

SEQ ID NO: 2668 - DNA, 200 bp, Kochia scoparia
caccaccgacttgaccatctaatacagttggaacattagcatcacaagaaggcttagggtttgtatcattccttggtgaagagtcactgtaaggaccatctacattaccagtacatctttccccattcaatgaggcttccccaccaccggacattgcagatcctaaaacctaaacattgcaggtcccaaatgctaagtat

SEQ ID NO: 2669 - DNA, 200 bp, Kochia scoparia
gtattagatggtcaagtcggtggtgcttgtgatgatgtagatgttaatgaaattgttttggaagcagtacctcctgtagtcggaatgagttttaaaagtatgcttgaggttgatgtgttttacaagaagtatgcaaagagtaaggggtttgctgttgtgagggttggtggatcgtctaatgttgctaaagaaagaataaa

SEQ ID NO: 2670 - DNA, 200 bp, Kochia scoparia
tttattctttctttagcaacattagacgatccaccaaccctcacaacagcaaaccccttactctttgcatacttcttgtaaaacacatcaacctcaagcatacttttaaaactcattccgactacaggaggtactgcttccaaaacaatttcattaacatctacatcatcacaagcaccaccgacttgaccatctaatac

SEQ ID NO: 2671 - DNA, 200 bp, Kochia scoparia
ctaatgttgctaaagaaagaataaatcagacatggcgttgtgagtgttatggctctcctgatgcgaagattattgccaagtcaaagagatttgctaaggatccagtatcggagaatttaaaggatcaggaactgtgtaatccacgtaggcgcaagtctaaaaaatgtaattgcacagctaagatttatgctagtgttaat

SEQ ID NO: 2672 - DNA, 200 bp, Kochia scoparia
attaacactagcataaatcttagctgtgcaattacattttttagacttgcgcctacgtggattacacagttcctgatcctttaaattctccgatactggatccttagcaaatctctttgacttggcaataatcttcgcatcaggagagccataacactcacaacgccatgtctgatttattctttctttagcaacattag

SEQ ID NO: 2673 - DNA, 200 bp, Kochia scoparia
agctaagatttatgctagtgttaatgaatgtagacattggattatacgtgaagtagtgcttgatcatttgaatcatgatcccaaacctaaggatgccaaactagtgaaggcatataggatgcaggagtttacttctacggaccgttcaagagttataaatggtgctgcagctggtgggaaggtgggtgttatgtatggtt

SEQ ID NO: 2674 - DNA, 200 bp, Kochia scoparia
aaccatacataacacccaccttcccaccagctgcagcaccatttataactcttgaacggtccgtagaagtaaactcctgcatcctatatgccttcactagtttggcatccttaggtttgggatcatgattcaaatgatcaagcactacttcacgtataatccaatgtctacattcattaacactagcataaatcttagct

SEQ ID NO: 2675 - DNA, 200 bp, Kochia scoparia
gggaaggtgggtgttatgtatggttcaatggcgaacgaaaggggtggttatgagaacatgccctttactcaatgtgacatgaggcatgtgcttaatgaagaacgtaggagaaagatgagtggtggtgattttaatgcgttgctagcttattttgggaagttgcagcgtgataattctaacttttatcatgttcaccgagt

SEQ ID NO: 2676 - DNA, 200 bp, Kochia scoparia
actcggtgaacatgataaaagttagaattatcacgctgcaacttcccaaaataagctagcaacgcattaaaatcaccaccactcatctttctcctacgttcttcattaagcacatgcctcatgtcacattgagtaaagggcatgttctcataaccacccctttcgttcgccattgaaccatacataacacccaccttccc

SEQ ID NO: 2677 - DNA, 200 bp, Kochia scoparia
ctaacttttatcatgttcaccgagtcgattctgggggaacaatcaaggatgttctgtgggtagatgctcgtagtatggccgcatatgaggagttttctgacgttgtgtgttttgacaccacgtacttgactaatcaatattctttaccttttgcaaatttcattggcgttaaccatcatggtcaaagcatcctttttggg

SEQ ID NO: 2678 - DNA, 200 bp, Kochia scoparia
cccaaaaaggatgctttgaccatgatggttaacgccaatgaaatttgcaaaaggtaaagaatattgattagtcaagtacgtggtgtcaaaacacacaacgtcagaaaactcctcatatgcggccatactacgagcatctacccacagaacatccttgattgttcccccagaatcgactcggtgaacatgataaaagttag

SEQ ID NO: 2679 - DNA, 200 bp, Kochia scoparia
tcatggtcaaagcatcctttttgggtgtgctctgatttccaatgaagatagcgagacgtttgagtgggtttttagggagtggctgttatgcatgaagggaaaggctccgggtggtatcttaaccgatcaagccgctgcaatgcgacgacccttggagaaagtcatgcctgataccaaacatcgttggtgtatttggcata

SEQ ID NO: 2680 - DNA, 200 bp, Kochia scoparia
tatgccaaatacaccaacgatgtttggtatcaggcatgactttctccaagggtcgtcgcattgcagcggcttgatcggttaagataccacccggagcctttcccttcatgcataacagccactccctaaaaacccactcaaacgtctcgctatcttcattggaaatcagagcacacccaaaaaggatgctttgaccatga

SEQ ID NO: 2681 - DNA, 200 bp, Kochia scoparia
aaacatcgttggtgtatttggcatattaccaagaaactgccctacaagtttggatctcgcaagtggtattatttcgaaccctaatcttccttgtttattcttgtatttgtgttattttgctgtttagtgtctccttgataagtgtcttgtgactccttgatttttttcacttgtgctgaatatcttagtgaaatgcaatt

SEQ ID NO: 2682 - DNA, 200 bp, Kochia scoparia
aattgcatttcactaagatattcagcacaagtgaaaaaaatcaaggagtcacaagacacttatcaaggagacactaaacagcaaaataacacaaatacaagaataaacaaggaagattagggttcgaaataataccacttgcgagatccaaacttgtagggcagtttcttggtaatatgccaaatacaccaacgatgttt

SEQ ID NO: 2683 - DNA, 200 bp, Kochia scoparia
ctgaatatcttagtgaaatgcaattgtttaaatcttagtgaaatgcaattcttagtggaatatcttagtgaaatgcaatatcttagtgaaatgcaattcttagtggaatatcttagtgaaatgcaatatcttagtgaaatgcaattctcttaacattcgatcaaattgaaatgcaatttttttgcttgttctggtgttgt

SEQ ID NO: 2684 - DNA, 200 bp, Kochia scoparia
acaacaccagaacaagcaaaaaaattgcatttcaatttgatcgaatgttaagagaattgcatttcactaagatattgcatttcactaagatattccactaagaattgcatttcactaagatattgcatttcactaagatattccactaagaattgcatttcactaagatttaaacaattgcatttcactaagatattcag

SEQ ID NO: 2685 - DNA, 200 bp, Kochia scoparia
atttttttgcttgttctggtgttgttgaatgattaattttccggtttatgcttgtgtcgtatctttcataagttgcagcatattatggtaatatgttttaatttgttaatatttccaaacttgcacagttacaaggaatttaagaaggagtggttgaatgttgtttataatagtttgaatgaggcctccttcgaacgccg

SEQ ID NO: 2686 - DNA, 200 bp, Kochia scoparia
cggcgttcgaaggaggcctcattcaaactattataaacaacattcaaccactccttcttaaattccttgtaactgtgcaagtttggaaatattaacaaattaaaacatattaccataatatgctgcaacttatgaaagatacgacacaagcataaaccggaaaattaatcattcaacaacaccagaacaagcaaaaaaat

SEQ ID NO: 2687 - DNA, 200 bp, Kochia scoparia
tgaatgaggcctccttcgaacgccgttggaaggaggttgtgagtaagtatggtttggaaaacgatgagtggttgcagaatctatttgctgagaaacacatgtgggtgccctcgtttatgactgatcatttttgggcgggtatgcgttctacgcaaagggtggagagtataaatagtttttttgaccaatttgttgatcga

SEQ ID NO: 2688 - DNA, 200 bp, Kochia scoparia
tcgatcaacaaattggtcaaaaaaactatttatactctccaccctttgcgtagaacgcatacccgcccaaaaatgatcagtcataaacgagggcacccacatgtgtttctcagcaaatagattctgcaaccactcatcgttttccaaaccatacttactcacaacctccttccaacggcgttcgaaggaggcctcattca

SEQ ID NO: 2689 - DNA, 200 bp, Kochia scoparia
tttttttgaccaatttgttgatcgaaacacgtcctttgctgaatttggagaaaagtacattaatgcggtcgagaagaggattatggaggagaatgaagctgaccataaggaggtgaagttctttaggaattattctactggttttagtgtcgagaggttttttaagaaaatttacacctcaagtatgtttaggtctatac

SEQ ID NO: 2690 - DNA, 200 bp, Kochia scoparia
gtatagacctaaacatacttgaggtgtaaattttcttaaaaaacctctcgacactaaaaccagtagaataattcctaaagaacttcacctccttatggtcagcttcattctcctccataatcctcttctcgaccgcattaatgtacttttctccaaattcagcaaaggacgtgtttcgatcaacaaattggtcaaaaaaa

SEQ ID NO: 2691 - DNA, 200 bp, Kochia scoparia
acctcaagtatgtttaggtctatacaaaaggagtgtgagaaacgaacctattgtatgattgatgaggtgaagaggttggatgacaaaaattttgagtatttgatggaggatagggtgtggattaaaaagaagaagagatatattgaaatattgactgatgatcgtactcactataccgtgtcttacaattgtgagactaa

SEQ ID NO: 2692 - DNA, 200 bp, Kochia scoparia
ttagtctcacaattgtaagacacggtatagtgagtacgatcatcagtcaatatttcaatatatctcttcttctttttaatccacaccctatcctccatcaaatactcaaaatttttgtcatccaacctcttcacctcatcaatcatacaataggttcgtttctcacactccttttgtatagacctaaacatacttgaggt

SEQ ID NO: 2693 - DNA, 200 bp, Kochia scoparia
ccgtgtcttacaattgtgagactaaggatggtatttgtgaatgcaaaaaatttgagactgacggtattatttgtaggcacttgataactctcttttataaggtcaggctagatgatataccagataagtacgttcttaggcgttggaggaaagatgttgtgaggaagcactctagtgtcactgtctcctttcatgatttg

SEQ ID NO: 2694 - DNA, 200 bp, Kochia scoparia
caaatcatgaaaggagacagtgacactagagtgcttcctcacaacatctttcctccaacgcctaagaacgtacttatctggtatatcatctagcctgaccttataaaagagagttatcaagtgcctacaaataataccgtcagtctcaaattttttgcattcacaaataccatccttagtctcacaattgtaagacacgg

SEQ ID NO: 2695 - DNA, 200 bp, Kochia scoparia
tgtcactgtctcctttcatgatttgagtcgaacagaacaggttaagaggcgtgataggttggtggtggtatttgagcctcttagtcaacttgcttcaaagtcagaagtgtgtactgtaattatgcttaaaggcatggctacaattgagggtgaaattactaaagtgttgtctgaggataaggttgaagaggttaatgaag

SEQ ID NO: 2696 - DNA, 200 bp, Kochia scoparia
cttcattaacctcttcaaccttatcctcagacaacactttagtaatttcaccctcaattgtagccatgcctttaagcataattacagtacacacttctgactttgaagcaagttgactaagaggctcaaataccaccaccaacctatcacgcctcttaacctgttctgttcgactcaaatcatgaaaggagacagtgaca

SEQ ID NO: 2697 - DNA, 200 bp, Kochia scoparia
gataaggttgaagaggttaatgaagctgctgctgatgttgagatgcaatcaggtgtaggatgtgacacggatgacagccttgatggctctgagtctgaaatgggtggccatagcaatggtgttgaatctcgagcgagtgaggtagtaggctcatctacaagtacccctagcaaaagtgtaggaatcaaggatccagttat

SEQ ID NO: 2698 - DNA, 200 bp, Kochia scoparia
ataactggatccttgattcctacacttttgctaggggtacttgtagatgagcctactacctcactcgctcgagattcaacaccattgctatggccacccatttcagactcagagccatcaaggctgtcatccgtgtcacatcctacacctgattgcatctcaacatcagcagcagcttcattaacctcttcaaccttatc

SEQ ID NO: 2699 - DNA, 200 bp, Kochia scoparia
gtgtaggaatcaaggatccagttattaaaaagaagcgcggaaggccagttggttctaggttcaaggcaatttcagagacgggttggtcattgaaatcaaaatctcaaagtgaatcatgcacctgtcagtgcgatgctcataagtgtgtgagctctaagaagaagggacgtgggaaaggcaagtgtaacgagaagaaggtg

SEQ ID NO: 2700 - DNA, 200 bp, Kochia scoparia
caccttcttctcgttacacttgcctttcccacgtcccttcttcttagagctcacacacttatgagcatcgcactgacaggtgcatgattcactttgagattttgatttcaatgaccaacccgtctctgaaattgccttgaacctagaaccaactggccttccgcgcttctttttaataactggatccttgattcctacac

SEQ ID NO: 2701 - DNA, 200 bp, Kochia scoparia
aggcaagtgtaacgagaagaaggtgtcccaatctgagcacacacaggtatgtttttggtttcgtgtctcattttaatcaaagtgtcccatttaattacaatattaactatgctctgtatgagttcatatttaatgtagtgtgtttgaacttaggatgatggagctcaagcctgcagcaatcccggagatgcccctcgtaa

SEQ ID NO: 2702 - DNA, 200 bp, Kochia scoparia
ttacgaggggcatctccgggattgctgcaggcttgagctccatcatcctaagttcaaacacactacattaaatatgaactcatacagagcatagttaatattgtaattaaatgggacactttgattaaaatgagacacgaaaccaaaaacatacctgtgtgtgctcagattgggacaccttcttctcgttacacttgcct

SEQ ID NO: 2703 - DNA, 200 bp, Kochia scoparia
gcaatcccggagatgcccctcgtaaggtgactgggatattagctattcatgttcagtgtttttcattattggtgatttgatacttgatatgcatgttcattcttgagccgaagaagtctcttattggtgctttgatacttaatatgcatgtaaatttgttttgatttcaattgtttgcagtcgaaacgaatcaaaaaagt

SEQ ID NO: 2704 - DNA, 200 bp, Kochia scoparia
acttttttgattcgtttcgactgcaaacaattgaaatcaaaacaaatttacatgcatattaagtatcaaagcaccaataagagacttcttcggctcaagaatgaacatgcatatcaagtatcaaatcaccaataatgaaaaacactgaacatgaatagctaatatcccagtcaccttacgaggggcatctccgggattgc

SEQ ID NO: 2705 - DNA, 200 bp, Kochia scoparia
tgcagtcgaaacgaatcaaaaaagtttctttcgttgatgaggaattgaatccggaaggagatactcgtgtaggtgatgtttttaacaatgccaatgaaagtcaggattatgtttccttaagttgactcaacatttaaatgttaaaggtattttattttaaaatttcctctacggcggcataaattttatttacgagcatt

SEQ ID NO: 2706 - DNA, 200 bp, Kochia scoparia
aatgctcgtaaataaaatttatgccgccgtagaggaaattttaaaataaaatacctttaacatttaaatgttgagtcaacttaaggaaacataatcctgactttcattggcattgttaaaaacatcacctacacgagtatctccttccggattcaattcctcatcaacgaaagaaacttttttgattcgtttcgactgca

SEQ ID NO: 2707 - DNA, 200 bp, Kochia scoparia
ggcataaattttatttacgagcattgcatcattagtatggttgactagaatgttagatacaatgaatgcttttgcgaaaaatgaaaagaaatgtttctgggatcatgctcatgacttcacccttgtttgacaggaaatgatgtttgaattgaagattgttggaacgatttcagctgtgcaatcagggtgcttcaagtgat

SEQ ID NO: 2708 - DNA, 200 bp, Kochia scoparia
atcacttgaagcaccctgattgcacagctgaaatcgttccaacaatcttcaattcaaacatcatttcctgtcaaacaagggtgaagtcatgagcatgatcccagaaacatttcttttcatttttcgcaaaagcattcattgtatctaacattctagtcaaccatactaatgatgcaatgctcgtaaataaaatttatgcc

SEQ ID NO: 2709 - DNA, 200 bp, Kochia scoparia
gtgcaatcagggtgcttcaagtgatccgcttcaaaagattaatgctaattggaaactagtgaaagacgattatgcgtgtttccctttaattatgtatttgattgatgcattctttcattaatttgctcactgtgcaaccaggaattctatcttttggattagagctgcaatttgaaacttgaaagaatttgtaaacagga

SEQ ID NO: 2710 - DNA, 200 bp, Kochia scoparia
tcctgtttacaaattctttcaagtttcaaattgcagctctaatccaaaagatagaattcctggttgcacagtgagcaaattaatgaaagaatgcatcaatcaaatacataattaaagggaaacacgcataatcgtctttcactagtttccaattagcattaatcttttgaagcggatcacttgaagcaccctgattgcac

SEQ ID NO: 2711 - DNA, 200 bp, Kochia scoparia
aacttgaaagaatttgtaaacaggattcaaaagttctcgcattgcatattacgctattcttttgttgagttatacttcattatccgtcactattgccattataatacatagagatttttcttgaacacaataatcatgtgttttgttgcacgatattactaattactgtttgatgatttttaaaccattaacttcatatt

SEQ ID NO: 2712 - DNA, 200 bp, Kochia scoparia
aatatgaagttaatggtttaaaaatcatcaaacagtaattagtaatatcgtgcaacaaaacacatgattattgtgttcaagaaaaatctctatgtattataatggcaatagtgacggataatgaagtataactcaacaaaagaatagcgtaatatgcaatgcgagaacttttgaatcctgtttacaaattctttcaagtt

SEQ ID NO: 2713 - DNA, 200 bp, Kochia scoparia
atttttaaaccattaacttcatattgtaactttcatttaatgctacagatttttatctaaaattaaaaaaagggcacccaaaaaggattataaattccatgatgatctagttagcttgttgataagataacttctctcccgtatcctcttgaatttgatcacattcacatcatatcaagaaactaaaataggtagaatag

SEQ ID NO: 2714 - DNA, 200 bp, Kochia scoparia
ctattctacctattttagtttcttgatatgatgtgaatgtgatcaaattcaagaggatacgggagagaagttatcttatcaacaagctaactagatcatcatggaatttataatcctttttgggtgccctttttttaattttagataaaaatctgtagcattaaatgaaagttacaatatgaagttaatggtttaaaaat

SEQ ID NO: 2715 - DNA, 200 bp, Kochia scoparia
caagaaactaaaataggtagaatagattggtgttagttgaaaatagtgcaaagaaacaagctaaggttaataaataagacttattatacaggtgacaagtaatattatcactaattaagctagattctacgtaataaataagacttataataagaccctattaatattcttgacgtggacattgtacgtaaataatggta

SEQ ID NO: 2716 - DNA, 200 bp, Kochia scoparia
taccattatttacgtacaatgtccacgtcaagaatattaatagggtcttattataagtcttatttattacgtagaatctagcttaattagtgataatattacttgtcacctgtataataagtcttatttattaaccttagcttgtttctttgcactattttcaactaacaccaatctattctacctattttagtttcttg

SEQ ID NO: 2717 - DNA, 200 bp, Kochia scoparia
tggacattgtacgtaaataatggtagtcgagtcaaaatgtatagatagattggagagtcaaaatgtaaataatggtaatcgcaattatttcacccattttcttctttttaatcagcaccatccataacaaacattcgattatgctgtgaacaaatcagatcatgaaagtaagtcaaggtgaacaaatcagatcatgcaaa

SEQ ID NO: 2718 - DNA, 200 bp, Kochia scoparia
tttgcatgatctgatttgttcaccttgacttactttcatgatctgatttgttcacagcataatcgaatgtttgttatggatggtgctgattaaaaagaagaaaatgggtgaaataattgcgattaccattatttacattttgactctccaatctatctatacattttgactcgactaccattatttacgtacaatgtcca

SEQ ID NO: 2719 - DNA, 200 bp, Kochia scoparia
aggtgaacaaatcagatcatgcaaattacaattatgctacaaagaactcaaacttgttccaaagctcgaaatccaagaaagtctcaggggttaaaataaacaatgctaggacaaattcgaatccaaaagtttgtctttcgttcattgcaccatatttaattaaacataaatccatacaaacataagaaattcctaaacat

SEQ ID NO: 2720 - DNA, 200 bp, Kochia scoparia
atgtttaggaatttcttatgtttgtatggatttatgtttaattaaatatggtgcaatgaacgaaagacaaacttttggattcgaatttgtcctagcattgtttattttaacccctgagactttcttggatttcgagctttggaacaagtttgagttctttgtagcataattgtaatttgcatgatctgatttgttcacct

SEQ ID NO: 2721 - DNA, 200 bp, Kochia scoparia
acaaacataagaaattcctaaacatcattcaacacataatagctaatgcaattcgcactcccttccgtattctgctcggccaaacttgggttactccacttccttctttacaccctgaaattcaattgaaatcagtttgcaacttacatgagtcgacaacaggacaatgaagttattaaaataggtgacacaaagaggca

SEQ ID NO: 2722 - DNA, 200 bp, Kochia scoparia
tgcctctttgtgtcacctattttaataacttcattgtcctgttgtcgactcatgtaagttgcaaactgatttcaattgaatttcagggtgtaaagaaggaagtggagtaacccaagtttggccgagcagaatacggaagggagtgcgaattgcattagctattatgtgttgaatgatgtttaggaatttcttatgtttgt

SEQ ID NO: 2723 - DNA, 200 bp, Kochia scoparia
ttaaaataggtgacacaaagaggcagcacacaagaatctagattaataccccaaaatgcattttgataattaaacaagaatctagtttgcaattttgtgttaacaacaaaccagtgggcatttaatttatgttttaaaatattactaaaccctaaacccttaactttgtttatattaaaccatgcacaaccattaacttt

SEQ ID NO: 2724 - DNA, 200 bp, Kochia scoparia
aaagttaatggttgtgcatggtttaatataaacaaagttaagggtttagggtttagtaatattttaaaacataaattaaatgcccactggtttgttgttaacacaaaattgcaaactagattcttgtttaattatcaaaatgcattttggggtattaatctagattcttgtgtgctgcctctttgtgtcacctattttaa

SEQ ID NO: 2725 - DNA, 200 bp, Kochia scoparia
taaaccatgcacaaccattaactttgtttatattaaaaattatgttataaaatattactaaaccctaaacccttattcggatatggtcatacctcgatgcgaccatgcatctccccctctattagctgtgagcgagtgaagtgcaccttgccttcatcccaaagcattaagaggccgcctgttttccctcgtggaggagt

SEQ ID NO: 2726 - DNA, 200 bp, Kochia scoparia
actcctccacgagggaaaacaggcggcctcttaatgctttgggatgaaggcaaggtgcacttcactcgctcacagctaatagagggggagatgcatggtcgcatcgaggtatgaccatatccgaataagggtttagggtttagtaatattttataacataatttttaatataaacaaagttaatggttgtgcatggttta

SEQ ID NO: 2727 - DNA, 200 bp, Kochia scoparia
cactacccttccctcaactaattataccaacaaaaaaacgccttggagtccgcaataatgaaagtggtgcgagtaatataaaacggaggaagtatttattttttagattaactgttgtaaccattttttggttaattttgaggctaaagtatggccttttgacaattaactttcaatattaatctctaatgtggtgtaaa

SEQ ID NO: 2728 - DNA, 200 bp, Kochia scoparia
tttacaccacattagagattaatattgaaagttaattgtcaaaaggccatactttagcctcaaaattaaccaaaaaatggttacaacagttaatctaaaaaataaatacttcctccgttttatattactcgcaccactttcattattgcggactccaaggcgtttttttgttggtataattagttgagggaagggtagtg

SEQ ID NO: 2729 - DNA, 200 bp, Kochia scoparia
atattaatctctaatgtggtgtaaagtcatccattttaatatcagacaattgtgtttgactcccaaaaaaggataatttacttcttattgttttgtgactgccaaaaaggatcacttgaatgtcatggattgtttaatcacctatttaggcattgttgtgttgtgattcacctcatctttaggtccaatagattttggct

SEQ ID NO: 2730 - DNA, 200 bp, Kochia scoparia
agccaaaatctattggacctaaagatgaggtgaatcacaacacaacaatgcctaaataggtgattaaacaatccatgacattcaagtgatcctttttggcagtcacaaaacaataagaagtaaattatccttttttgggagtcaaacacaattgtctgatattaaaatggatgactttacaccacattagagattaatat

SEQ ID NO: 2731 - DNA, 200 bp, Kochia scoparia
tctttaggtccaatagattttggctgaatcttacttgtgactgccaaaaaggatcactgacaatttacttgtttaacggattttactcagggtgatgttaaattcgcggaggttcttgagaagatgggttgcaaagttacatggacagagaccagtgtcactgtaactggaccgcccagggactcatctggaagaaaaca

SEQ ID NO: 2732 - DNA, 200 bp, Kochia scoparia
tgttttcttccagatgagtccctgggcggtccagttacagtgacactggtctctgtccatgtaactttgcaacccatcttctcaagaacctccgcgaatttaacatcaccctgagtaaaatccgttaaacaagtaaattgtcagtgatcctttttggcagtcacaagtaagattcagccaaaatctattggacctaaaga

SEQ ID NO: 2733 - DNA, 200 bp, Kochia scoparia
ccagggactcatctggaagaaaacatttgcgtgccatcgatgttaacatgaacaaaatgccagatgttgcgatgactcttgctgttgttgccctatatgcagatgggcccacagctatcagagacggtattaactcctttctgatacattacacttttcttgtgctatatattgtttcaaatttgataattcgatcatgc

SEQ ID NO: 2734 - DNA, 200 bp, Kochia scoparia
gcatgatcgaattatcaaatttgaaacaatatatagcacaagaaaagtgtaatgtatcagaaaggagttaataccgtctctgatagctgtgggcccatctgcatatagggcaacaacagcaagagtcatcgcaacatctggcattttgttcatgttaacatcgatggcacgcaaatgttttcttccagatgagtccctgg

SEQ ID NO: 2735 - DNA, 200 bp, Kochia scoparia
ttcaaatttgataattcgatcatgcttcaaattttgcacacagccgtaatccatggttataaaatgactatgacacttgtcttgttactgaaaagtgcatacagtaacaaagctgatgttacttcttagtttactctaataatggttggacggtcactggcgcacatccccatggttggaagttgtgaatattgttgtca

SEQ ID NO: 2736 - DNA, 200 bp, Kochia scoparia
tgacaacaatattcacaacttccaaccatggggatgtgcgccagtgaccgtccaaccattattagagtaaactaagaagtaacatcagctttgttactgtatgcacttttcagtaacaagacaagtgtcatagtcattttataaccatggattacggctgtgtgcaaaatttgaagcatgatcgaattatcaaatttgaa

SEQ ID NO: 2737 - DNA, 200 bp, Kochia scoparia
ttggaagttgtgaatattgttgtcataatggcttatggagcatcttttggtacacttcaggagtaaaagaccactagtccagtatagggttaatcacctctagaactagttagtcacatatactcggaaaattattcatattttgtggttacatgcgttcgtttatctgcatcttgcctagtgtctcctcttgaaatcat

SEQ ID NO: 2738 - DNA, 200 bp, Kochia scoparia
atgatttcaagaggagacactaggcaagatgcagataaacgaacgcatgtaaccacaaaatatgaataattttccgagtatatgtgactaactagttctagaggtgattaaccctatactggactagtggtcttttactcctgaagtgtaccaaaagatgctccataagccattatgacaacaatattcacaacttccaa

SEQ ID NO: 2739 - DNA, 200 bp, Kochia scoparia
gcctagtgtctcctcttgaaatcattcatatatgttcttttttttccccttcatctgttacatgttcaaaatatgcttacaacgaaattgggtaacttgaccagttgctagctggagagtgaaggaaacagaaaggatgattgccatctgtacagaactcagaaaggttagccacattctttaatcttgtagtaaaaaat

SEQ ID NO: 2740 - DNA, 200 bp, Kochia scoparia
attttttactacaagattaaagaatgtggctaacctttctgagttctgtacagatggcaatcatcctttctgtttccttcactctccagctagcaactggtcaagttacccaatttcgttgtaagcatattttgaacatgtaacagatgaaggggaaaaaaaagaacatatatgaatgatttcaagaggagacactaggc

SEQ ID NO: 2741 - DNA, 200 bp, Kochia scoparia
attctttaatcttgtagtaaaaaataaagttgcctgtttcatgtaagttgatgttaattcggacttttaaaattttcagcttggagcaacagttgaggaaggacctgattactgtgtgatcactccaccagaaaaactaaacgtaaccgccatcgacacatatgatgatcatcgaatggccatggcattctctcttgctg

SEQ ID NO: 2742 - DNA, 200 bp, Kochia scoparia
cagcaagagagaatgccatggccattcgatgatcatcatatgtgtcgatggcggttacgtttagtttttctggtggagtgatcacacagtaatcaggtccttcctcaactgttgctccaagctgaaaattttaaaagtccgaattaacatcaacttacatgaaacaggcaactttattttttactacaagattaaagaat

SEQ ID NO: 2743 - DNA, 200 bp, Kochia scoparia
atggccatggcattctctcttgctgcctgtgctgatgttcctgtcactattaaggacccaggctgcacccgcaagaccttcccagactactttgacgtcttggaacggtttgccaagcattgagcggctatctgcagatttttcataaagtatgcacgaaagtttcaatttaagaagataccgagttgattatatgcttt

SEQ ID NO: 2744 - DNA, 200 bp, Kochia scoparia
aaagcatataatcaactcggtatcttcttaaattgaaactttcgtgcatactttatgaaaaatctgcagatagccgctcaatgcttggcaaaccgttccaagacgtcaaagtagtctgggaaggtcttgcgggtgcagcctgggtccttaatagtgacaggaacatcagcacaggcagcaagagagaatgccatggccat

SEQ ID NO: 2745 - DNA, 200 bp, Kochia scoparia
agataccgagttgattatatgctttccgcataagttattgtcacattttttgtattatgtttgtaagatcttaggcaataagatatactgttagaaattatgtgtatctgattatttagagatgtatacttgggtcagttgaaattgtacgagaaaggtctggatttcgaaaaaaatgtgatccagacattagtgtggtc

SEQ ID NO: 2746 - DNA, 200 bp, Kochia scoparia
gaccacactaatgtctggatcacatttttttcgaaatccagacctttctcgtacaatttcaactgacccaagtatacatctctaaataatcagatacacataatttctaacagtatatcttattgcctaagatcttacaaacataatacaaaaaatgtgacaataacttatgcggaaagcatataatcaactcggtatct

SEQ ID NO: 2747 - DNA, 200 bp, Kochia scoparia
atgtgatccagacattagtgtggtctgaactgaagcaagtactccctccgtctcataattctcacaactcttgctattatttgtgagaaataaaatattcaagtgttgcgagaattgtgtgacagcgggagtagcaacttttcaagtttggaattaattttgtgatgtgagttttttgtgtattctttgttttccatcaa

SEQ ID NO: 2748 - DNA, 200 bp, Kochia scoparia
ttgatggaaaacaaagaatacacaaaaaactcacatcacaaaattaattccaaacttgaaaagttgctactcccgctgtcacacaattctcgcaacacttgaatattttatttctcacaaataatagcaagagttgtgagaattatgagacggagggagtacttgcttcagttcagaccacactaatgtctggatcacat

SEQ ID NO: 2749 - DNA, 200 bp, Kochia scoparia
ttgtgtattctttgttttccatcaaaccctcctccaaagtacaaacccaattcatggtatggttgatgcaacagcaatatgtcaaaatcagtgtttgtgatgttggcttctctacttcattatctcttcttgttcagtatgatttcgcaatctcttcccgtcaaaatcccttctcctctgataatcgcagaaatcgtgtc

SEQ ID NO: 2750 - DNA, 200 bp, Kochia scoparia
gacacgatttctgcgattatcagaggagaagggattttgacgggaagagattgcgaaatcatactgaacaagaagagataatgaagtagagaagccaacatcacaaacactgattttgacatattgctgttgcatcaaccataccatgaattgggtttgtactttggaggagggtttgatggaaaacaaagaatacacaa

SEQ ID NO: 2751 - DNA, 200 bp, Kochia scoparia
ctctgataatcgcagaaatcgtgtcttcccctcggtgtgtatccacctcttaaaaatttgttgagagttgaaatgtgctgccactggattcatcctttagggcgaattttgaacggattttaggtggttaggattcaacccctgtcaattatagttacgggaattagacacgcgttctgccttaccaaccccattttttt

SEQ ID NO: 2752 - DNA, 200 bp, Kochia scoparia
aaaaaaatggggttggtaaggcagaacgcgtgtctaattcccgtaactataattgacaggggttgaatcctaaccacctaaaatccgttcaaaattcgccctaaaggatgaatccagtggcagcacatttcaactctcaacaaatttttaagaggtggatacacaccgaggggaagacacgatttctgcgattatcagag

SEQ ID NO: 2753 - DNA, 200 bp, Kochia scoparia
ccctcgttttcctcttctttttttccatacaggttttgtagtcatttagtggaggtgggttgatctcctaataaagtgggtttgtcgattcttctttcttctgcaaccagcagagccgagttgaattgaggtgcagccttgaggaagacctgaaacaaagtcattacaaagagaattatagatgttcatgattctgtgta

SEQ ID NO: 2754 - DNA, 200 bp, Kochia scoparia
tacacagaatcatgaacatctataattctctttgtaatgactttgtttcaggtcttcctcaaggctgcacctcaattcaactcggctctgctggttgcagaagaaagaagaatcgacaaacccactttattaggagatcaacccacctccactaaatgactacaaaacctgtatggaaaaaaagaagaggaaaacgaggg

SEQ ID NO: 2755 - DNA, 200 bp, Kochia scoparia
ttatagatgttcatgattctgtgtaagcctgatgagctttgtaaaactttgtagtttgtgcaatttggtaattgattttgtaaccaccatcgttatctttagcgcgccttatggtaaatttggaagcataatgagctaaaagatcccaatttggctttgtaaaattgctattgattggaaccttgtttttgggagcttga

SEQ ID NO: 2756 - DNA, 200 bp, Kochia scoparia
tcaagctcccaaaaacaaggttccaatcaatagcaattttacaaagccaaattgggatcttttagctcattatgcttccaaatttaccataaggcgcgctaaagataacgatggtggttacaaaatcaattaccaaattgcacaaactacaaagttttacaaagctcatcaggcttacacagaatcatgaacatctataa

SEQ ID NO: 2757 - DNA, 200 bp, Kochia scoparia
tggaaccttgtttttgggagcttgaaacgattacttcaaacaaacaaaaaaaattgttgatgccgtaatgcggtatatagtgtttgtccttaattagacatttggggttttttttcccaacttgaatttgacaaagatgagatcccaggaataagtgacagccaaaacttaagttggtgcaacaactagtgtaattcata

SEQ ID NO: 2758 - DNA, 200 bp, Kochia scoparia
tatgaattacactagttgttgcaccaacttaagttttggctgtcacttattcctgggatctcatctttgtcaaattcaagttgggaaaaaaaaccccaaatgtctaattaaggacaaacactatataccgcattacggcatcaacaattttttttgtttgtttgaagtaatcgtttcaagctcccaaaaacaaggttcca

SEQ ID NO: 2759 - DNA, 200 bp, Kochia scoparia
ggtgcaacaactagtgtaattcataaattttgtatggtgtgatagtgtcaaaattataactagggcacacaaaatgactgcaataatgcttaataagcactaaatgtactttgtgtcgaattttgagtcaagtccacgtgtctttggatcggataagacagtccatggtttagccaacgagtcaggttcacgtgtctttg

SEQ ID NO: 2760 - DNA, 200 bp, Kochia scoparia
caaagacacgtgaacctgactcgttggctaaaccatggactgtcttatccgatccaaagacacgtggacttgactcaaaattcgacacaaagtacatttagtgcttattaagcattattgcagtcattttgtgtgccctagttataattttgacactatcacaccatacaaaatttatgaattacactagttgttgcacc

SEQ ID NO: 2761 - DNA, 200 bp, Kochia scoparia
aacgagtcaggttcacgtgtctttgggtcgtataagacgatccatggtctaacccggtgacgatgcgccgtgccctagttgcccactagtaggcaaggaaagtggtgtttgcatggagcctaagaagatatggattaggctgtcactgatcccttgtggccttgtatgttaatcaaattattagtagaggttataaaggg

SEQ ID NO: 2762 - DNA, 200 bp, Kochia scoparia
ccctttataacctctactaataatttgattaacatacaaggccacaagggatcagtgacagcctaatccatatcttcttaggctccatgcaaacaccactttccttgcctactagtgggcaactagggcacggcgcatcgtcaccgggttagaccatggatcgtcttatacgacccaaagacacgtgaacctgactcgtt

SEQ ID NO: 2763 - DNA, 200 bp, Kochia scoparia
aattattagtagaggttataaagggggggttggtgagctactaaactgattgccttgttgattgacaaaaccattttatgattttagttccatctttattcaatagtttatatatggtgtgctacactagtattattactattatatgatggaatattattctctccttttctttcacacatattctttttatctactac

SEQ ID NO: 2764 - DNA, 200 bp, Kochia scoparia
gtagtagataaaaagaatatgtgtgaaagaaaaggagagaataatattccatcatataatagtaataatactagtgtagcacaccatatataaactattgaataaagatggaactaaaatcataaaatggttttgtcaatcaacaaggcaatcagtttagtagctcaccaaccccccctttataacctctactaataatt

SEQ ID NO: 2765 - DNA, 200 bp, Kochia scoparia
cacacatattctttttatctactacattaatttatataataccacatgaagtatatacaaagttgcttatttcttatgtaataagcacatgatcattgtgatattaattaatcttttcgtggagaaaatgactagaggaaaattcaaaatattaaagtgtttttatgaacaaatgaacaaatggtgttaatctaatttca

SEQ ID NO: 2766 - DNA, 200 bp, Kochia scoparia
tgaaattagattaacaccatttgttcatttgttcataaaaacactttaatattttgaattttcctctagtcattttctccacgaaaagattaattaatatcacaatgatcatgtgcttattacataagaaataagcaactttgtatatacttcatgtggtattatataaattaatgtagtagataaaaagaatatgtgtg

SEQ ID NO: 2767 - DNA, 200 bp, Kochia scoparia
aacaaatggtgttaatctaatttcatagacaagttggtaactatggtcaatcacctcgggaaaaagtaatgacaattgtatcgatagtttggttcatgtggaatcaaaaaaatttatcgaattcatattattaattttgtgtgcgaatgaatatctatatttcatggaatattgactaaattgtgtgatttagactaaat

SEQ ID NO: 2768 - DNA, 200 bp, Kochia scoparia
atttagtctaaatcacacaatttagtcaatattccatgaaatatagatattcattcgcacacaaaattaataatatgaattcgataaatttttttgattccacatgaaccaaactatcgatacaattgtcattactttttcccgaggtgattgaccatagttaccaacttgtctatgaaattagattaacaccatttgtt

SEQ ID NO: 2769 - DNA, 200 bp, Kochia scoparia
ctaaattgtgtgatttagactaaataaaaatgcattaacgagagtcgatgaaatcgttaaaggattaaaacattaataaaatgatttatattttaactttttcatagttaacctaaaatagacaaaaaattactcatactcgatataaaaaaggatttttttatatataaataaacatagagatatataattttaaaaaa

SEQ ID NO: 2770 - DNA, 200 bp, Kochia scoparia
ttttttaaaattatatatctctatgtttatttatatataaaaaaatccttttttatatcgagtatgagtaattttttgtctattttaggttaactatgaaaaagttaaaatataaatcattttattaatgttttaatcctttaacgatttcatcgactctcgttaatgcatttttatttagtctaaatcacacaatttag

SEQ ID NO: 2771 - DNA, 200 bp, Kochia scoparia
catagagatatataattttaaaaaaaaatagctcgaacttattctcccatttgttttatcctttattgatgtaaatcactaacaaagttaattatcattccattcttaattttttttaatgaaggtcaatattcttacaatagtgattagctttttcaatataattttgttccaaaaaaaatattagtgatctttctttt

SEQ ID NO: 2772 - DNA, 200 bp, Kochia scoparia
aaaagaaagatcactaatattttttttggaacaaaattatattgaaaaagctaatcactattgtaagaatattgaccttcattaaaaaaaattaagaatggaatgataattaactttgttagtgatttacatcaataaaggataaaacaaatgggagaataagttcgagctatttttttttaaaattatatatctctatg

SEQ ID NO: 2773 - DNA, 200 bp, Kochia scoparia
aaaaaatattagtgatctttctttttaaaaaaaatggtagcactagcacaccaacactctcacaaattcaaccacaacaacccatgtttttgatttgcccaatttcttcttcaccaacccccttctctcttccacctaattttggttggtgaatccttcttctcattctctctcctaaaaagaagcttaaacccatcgtc

SEQ ID NO: 2774 - DNA, 200 bp, Kochia scoparia
gacgatgggtttaagcttctttttaggagagagaatgagaagaaggattcaccaaccaaaattaggtggaagagagaagggggttggtgaagaagaaattgggcaaatcaaaaacatgggttgttgtggttgaatttgtgagagtgttggtgtgctagtgctaccattttttttaaaaagaaagatcactaatatttttt

SEQ ID NO: 2775 - DNA, 200 bp, Kochia scoparia
taaaaagaagcttaaacccatcgtcaatcatatagtattagccatcaaaaacaacaacaagagagagaagaaacaatggctcaagctaccacctttaacaatggtgtcaaaaatggtcatcaattatgcgccaatttaccaaaaacccacttgcccaaatctcaaaaagctgtcaaatttggatcaaacttgagattttc

SEQ ID NO: 2776 - DNA, 200 bp, Kochia scoparia
gaaaatctcaagtttgatccaaatttgacagctttttgagatttgggcaagtgggtttttggtaaattggcgcataattgatgaccatttttgacaccattgttaaaggtggtagcttgagccattgtttcttctctctcttgttgttgtttttgatggctaatactatatgattgacgatgggtttaagcttcttttta

SEQ ID NO: 2777 - DNA, 200 bp, Kochia scoparia
aatttggatcaaacttgagattttctccaaagttgaagtctttcaacaatgaaagagtttctgggaaatcatcagttgtttttaaggttcatgcttcagttgctgctgctccctcaacttccccagaaattgtgttgcaacccattaaggagatttctggcactgttcaattgcctggttctaagtctttatctaatcga

SEQ ID NO: 2778 - DNA, 200 bp, Kochia scoparia
tcgattagataaagacttagaaccaggcaattgaacagtgccagaaatctccttaatgggttgcaacacaatttctggggaagttgagggagcagcagcaactgaagcatgaaccttaaaaacaactgatgatttcccagaaactctttcattgttgaaagacttcaactttggagaaaatctcaagtttgatccaaatt

SEQ ID NO: 2779 - DNA, 200 bp, Kochia scoparia
tggttctaagtctttatctaatcgaattcttcttttagctgctctttctgaggtacttttcgattgtttgatttcatcttttaccctgaatttggcgtttgtttaatgcagtttttgtgttttgaatctttgtaatttatgttaagttttaaaagaatgatgcttcttgtttctcttgttgtttgtgcattggttgttgg

SEQ ID NO: 2780 - DNA, 200 bp, Kochia scoparia
ccaacaaccaatgcacaaacaacaagagaaacaagaagcatcattcttttaaaacttaacataaattacaaagattcaaaacacaaaaactgcattaaacaaacgccaaattcagggtaaaagatgaaatcaaacaatcgaaaagtacctcagaaagagcagctaaaagaagaattcgattagataaagacttagaacca

SEQ ID NO: 2781 - DNA, 200 bp, Kochia scoparia
ttgttgtttgtgcattggttgttggattggtatcattgagaaatatgtatgcattagtaaaaattggtgtgttttgtgtagttttgcattaagttgtttaattgatatcattgagaaattgggttcagtacattgtttgactttggaatataaaaattggtggaaaaaaaacagcagatttttaacaaatgattgttatg

SEQ ID NO: 2782 - DNA, 200 bp, Kochia scoparia
cataacaatcatttgttaaaaatctgctgttttttttccaccaatttttatattccaaagtcaaacaatgtactgaacccaatttctcaatgatatcaattaaacaacttaatgcaaaactacacaaaacacaccaatttttactaatgcatacatatttctcaatgataccaatccaacaaccaatgcacaaacaacaa

SEQ ID NO: 2783 - DNA, 200 bp, Kochia scoparia
agatttttaacaaatgattgttatgtgaagatttgttatcatataatggaggatgaaagtcctgaagttgtatgaactagatgataaaacctcactttcactgatttcggggtggacaatcaaagaaccttgatcgagtaggagcaaaatgacaccctgaacatagatgaacaggcttcataatatatgtattcacttga

SEQ ID NO: 2784 - DNA, 200 bp, Kochia scoparia
tcaagtgaatacatatattatgaagcctgttcatctatgttcagggtgtcattttgctcctactcgatcaaggttctttgattgtccaccccgaaatcagtgaaagtgaggttttatcatctagttcatacaacttcaggactttcatcctccattatatgataacaaatcttcacataacaatcatttgttaaaaatct

SEQ ID NO: 2785 - DNA, 200 bp, Kochia scoparia
cttcataatatatgtattcacttgatgctttcggttacctcgaactgctgatgaggttgaggaaattgggatgtgtggtgcactttttcattttggtggcaagaatgcaagccttatggtacggcttgggagcgatcactgattagttggctcaagcttgacttttctagggagactatctcgaggaaggtggtttagtt

SEQ ID NO: 2786 - DNA, 200 bp, Kochia scoparia
aactaaaccaccttcctcgagatagtctccctagaaaagtcaagcttgagccaactaatcagtgatcgctcccaagccgtaccataaggcttgcattcttgccaccaaaatgaaaaagtgcaccacacatcccaatttcctcaacctcatcagcagttcgaggtaaccgaaagcatcaagtgaatacatatattatgaag

SEQ ID NO: 2787 - DNA, 200 bp, Kochia scoparia
ctatctcgaggaaggtggtttagtttaatacggtgtacagtagtcgaatcctcacaaatcacaactcaaatccaagtaaaagggacaactacacatgaaactcagattagttcatttatcaatacctcaagaacatacttaaggaaccaagtacaatttcttctctagatattgaaaggggaggaagtgatataaaaacc

SEQ ID NO: 2788 - DNA, 200 bp, Kochia scoparia
ggtttttatatcacttcctcccctttcaatatctagagaagaaattgtacttggttccttaagtatgttcttgaggtattgataaatgaactaatctgagtttcatgtgtagttgtcccttttacttggatttgagttgtgatttgtgaggattcgactactgtacaccgtattaaactaaaccaccttcctcgagatag

SEQ ID NO: 2789 - DNA, 200 bp, Kochia scoparia
aaggggaggaagtgatataaaaacctaaactcttgtcaggccacacttaaaggtccacatcatataccccagaactataggttaaagacatacagtacataagaattacgtcgatatgttgaaagaactgtcagattctaacataattgcacacaagcattcctctacaatctgagtttaacgaaattcccatcgcctgc

SEQ ID NO: 2790 - DNA, 200 bp, Kochia scoparia
gcaggcgatgggaatttcgttaaactcagattgtagaggaatgcttgtgtgcaattatgttagaatctgacagttctttcaacatatcgacgtaattcttatgtactgtatgtctttaacctatagttctggggtatatgatgtggacctttaagtgtggcctgacaagagtttaggtttttatatcacttcctcccctt

SEQ ID NO: 2791 - DNA, 200 bp, Kochia scoparia
gtttaacgaaattcccatcgcctgcttgcaacaatgggcatcgtaagtccattcactagcaccttcatcttcaccttcaccttcacttgacccagatggcacattgtagtgcaatttgaaaaactattctgagaacttacataaccagcctttgttcatagttacagtccttcgaatcctactccttaggcatgcacaat

SEQ ID NO: 2792 - DNA, 200 bp, Kochia scoparia
attgtgcatgcctaaggagtaggattcgaaggactgtaactatgaacaaaggctggttatgtaagttctcagaatagtttttcaaattgcactacaatgtgccatctgggtcaagtgaaggtgaaggtgaagatgaaggtgctagtgaatggacttacgatgcccattgttgcaagcaggcgatgggaatttcgttaaac

SEQ ID NO: 2793 - DNA, 200 bp, Kochia scoparia
atcctactccttaggcatgcacaatttcttcctatcaataaggagcttttaggttctcaaaactgaggtgggaaggaaagttgagaatagtatgcatttaagtttgttttttcatttttcgttcctgaacaactacacatgtctcctgtagatggactttggtactagtgtaattctgtgtcagtctcatgtctgctgcg

SEQ ID NO: 2794 - DNA, 200 bp, Kochia scoparia
cgcagcagacatgagactgacacagaattacactagtaccaaagtccatctacaggagacatgtgtagttgttcaggaacgaaaaatgaaaaaacaaacttaaatgcatactattctcaactttccttcccacctcagttttgagaacctaaaagctccttattgataggaagaaattgtgcatgcctaaggagtaggat

SEQ ID NO: 2795 - DNA, 200 bp, Kochia scoparia
ctgtgtcagtctcatgtctgctgcgtttttgcaccctccctttttctttgaccttgtgttgtcctattttctaaagtttcaacaacctaaccaaatttatgctgcagggtacaacagtacttgacaacttgctatatagtgatgatattcgctatatgttggatgctctaagaactcttgggctcaacgtagaggatgat

SEQ ID NO: 2796 - DNA, 200 bp, Kochia scoparia
atcatcctctacgttgagcccaagagttcttagagcatccaacatatagcgaatatcatcactatatagcaagttgtcaagtactgttgtaccctgcagcataaatttggttaggttgttgaaactttagaaaataggacaacacaaggtcaaagaaaaagggagggtgcaaaaacgcagcagacatgagactgacacag

SEQ ID NO: 2797 - DNA, 200 bp, Kochia scoparia
tcttgggctcaacgtagaggatgataataaggccaaaagggcaatcgtggagggttgtggcggtctatttcctgctggtaaagagaataggagtgagattgaacttttccttggaaacgcgggaacggcaatgcgcccattgacagctgcagttgccgttgctggaggaaattccaggttagtgaataacgatttctatg

SEQ ID NO: 2798 - DNA, 200 bp, Kochia scoparia
catagaaatcgttattcactaacctggaatttcctccagcaacggcaactgcagctgtcaatgggcgcattgccgttcccgcgtttccaaggaaaagttcaatctcactcctattctctttaccagcaggaaatagaccgccacaaccctccacgattgcccttttggccttattatcatcctctacgttgagcccaaga

SEQ ID NO: 2799 - DNA, 200 bp, Kochia scoparia
aggttagtgaataacgatttctatgtggatgtaatactgataggtttgtgtaaggcttatgatatagttgcacgataggtctactagaaagatgctattcattgtgaaaaaatatgttagattaatgtttgtgaaatgaaaatttaaagagattgtaactgtggaagtattgctgatggatgaacacaaactagatataa

SEQ ID NO: 2800 - DNA, 200 bp, Kochia scoparia
ttatatctagtttgtgttcatccatcagcaatacttccacagttacaatctctttaaattttcatttcacaaacattaatctaacatattttttcacaatgaatagcatctttctagtagacctatcgtgcaactatatcataagccttacacaaacctatcagtattacatccacatagaaatcgttattcactaacct

SEQ ID NO: 2801 - DNA, 200 bp, Kochia scoparia
atggatgaacacaaactagatataattaaaaggctaacagcgtgtattatctcgttaatatctgatgaactttttcagatttatctaaacataagctattgtattgggattaggataattctcgtagtccagacatcctgtcatggagtaaggattcttaagactatggatggttaattcaaactctggcaatcatcttt

SEQ ID NO: 2802 - DNA, 200 bp, Kochia scoparia
aaagatgattgccagagtttgaattaaccatccatagtcttaagaatccttactccatgacaggatgtctggactacgagaattatcctaatcccaatacaatagcttatgtttagataaatctgaaaaagttcatcagatattaacgagataatacacgctgttagccttttaattatatctagtttgtgttcatccat

SEQ ID NO: 2803 - DNA, 200 bp, Kochia scoparia
ggggtatttcatggaaaacgcaaatttacaggggtaccctgtagaaaatcccaacaaaaaaaattgttgatgccgtaatgcggtatatagtgtttgtccttaattagacatttggggttttttttcccaacttgaatttgacaaagatgagatcccaggaataagtgacagccaaaacttaagttggtgcaacaactagt

SEQ ID NO: 2804 - DNA, 200 bp, Kochia scoparia
actagttgttgcaccaacttaagttttggctgtcacttattcctgggatctcatctttgtcaaattcaagttgggaaaaaaaaccccaaatgtctaattaaggacaaacactatataccgcattacggcatcaacaattttttttgttgggattttctacagggtacccctgtaaatttgcgttttccatgaaatacccc

SEQ ID NO: 2805 - DNA, 200 bp, Kochia scoparia
aacttaagttggtgcaacaactagtgtaattcataaattttgtatggtgtgatagtgtcaaaattataactagggcacacaaaatgactgcaataatgcttaataagcactaaatgtactttgtgtcgaattttgagtctagtttacgtgtctttggatcggataagacagtccatggtttagcccatgagtcaggttca

SEQ ID NO: 2806 - DNA, 200 bp, Kochia scoparia
tgaacctgactcatgggctaaaccatggactgtcttatccgatccaaagacacgtaaactagactcaaaattcgacacaaagtacatttagtgcttattaagcattattgcagtcattttgtgtgccctagttataattttgacactatcacaccatacaaaatttatgaattacactagttgttgcaccaacttaagtt

SEQ ID NO: 2807 - DNA, 200 bp, Kochia scoparia
tggtttagcccatgagtcaggttcacgtgtctttggatcgtataagacgatccatggtctaacccggtgacgatgcgccgtgccctagttgcccactagtaggcaaggaaagtggtgtttgcatggagcctaagaagatatggattaggctgtcactgattccttgtggccttgtatgttgatcaaattattagcagagg

SEQ ID NO: 2808 - DNA, 200 bp, Kochia scoparia
cctctgctaataatttgatcaacatacaaggccacaaggaatcagtgacagcctaatccatatcttcttaggctccatgcaaacaccactttccttgcctactagtgggcaactagggcacggcgcatcgtcaccgggttagaccatggatcgtcttatacgatccaaagacacgtgaacctgactcatgggctaaacca

SEQ ID NO: 2809 - DNA, 200 bp, Kochia scoparia
atgttgatcaaattattagcagaggttataaaggggggttggtgagctactaaactgattgccttgttgattgacaaaaccattttatgattttagttccatctttattcaatagtttatatatggtgtgctacactagtattatatgatggaatattattctctccttttctttcacaaatattctttttatctactac

SEQ ID NO: 2810 - DNA, 200 bp, Kochia scoparia
gtagtagataaaaagaatatttgtgaaagaaaaggagagaataatattccatcatataatactagtgtagcacaccatatataaactattgaataaagatggaactaaaatcataaaatggttttgtcaatcaacaaggcaatcagtttagtagctcaccaacccccctttataacctctgctaataatttgatcaacat

SEQ ID NO: 2811 - DNA, 200 bp, Kochia scoparia
cacaaatattctttttatctactacattaatttatataataccacatgaagtatataaaaagttgctttttcttatgtaataagcacatgatcattgtgattttaattaatcttttcgtggagaaaatgactagaggaaaattcaaaatattaaagtgtttttatgaacaaatgaacaaatggtgttaatctaatttcat

SEQ ID NO: 2812 - DNA, 200 bp, Kochia scoparia
atgaaattagattaacaccatttgttcatttgttcataaaaacactttaatattttgaattttcctctagtcattttctccacgaaaagattaattaaaatcacaatgatcatgtgcttattacataagaaaaagcaactttttatatacttcatgtggtattatataaattaatgtagtagataaaaagaatatttgtg

SEQ ID NO: 2813 - DNA, 200 bp, Kochia scoparia
acaaatggtgttaatctaatttcatagacaagttggtaactatggtcaatcacctcggaaaaagtaatgacaattgtatcgatagtttggttcatgtggaatcaaaaaaatttatcgaattcatattattaattttgtgtgcgaatgaatatctatatttcatggaatattgactaaattgtgtgatttagactaaataa

SEQ ID NO: 2814 - DNA, 200 bp, Kochia scoparia
ttatttagtctaaatcacacaatttagtcaatattccatgaaatatagatattcattcgcacacaaaattaataatatgaattcgataaatttttttgattccacatgaaccaaactatcgatacaattgtcattactttttccgaggtgattgaccatagttaccaacttgtctatgaaattagattaacaccatttgt

SEQ ID NO: 2815 - DNA, 200 bp, Kochia scoparia
aaattgtgtgatttagactaaataaaaatgcattaacgagagtcgatgaaatcgttaaaggattaaaacattaataaaatgatttatattttaactttttcatagttaacctaaaatagacaaaaaattactcatactcgatataaaaaaggatttttttatatataaataaacatagagatatataattttaaaaaaaa

SEQ ID NO: 2816 - DNA, 200 bp, Kochia scoparia
ttttttttaaaattatatatctctatgtttatttatatataaaaaaatccttttttatatcgagtatgagtaattttttgtctattttaggttaactatgaaaaagttaaaatataaatcattttattaatgttttaatcctttaacgatttcatcgactctcgttaatgcatttttatttagtctaaatcacacaattt

SEQ ID NO: 2817 - DNA, 200 bp, Kochia scoparia
tagagatatataattttaaaaaaaaatagctcgaacttattctcccatttgttttatcctttattgatgtaaatcactaacaaagttaattattccattcctaatttttttttatgaaggtcaatattcttacaatagtgattagctttttcaatataatttttttccaaaaaaatattagtgatctttctttttttaaa

SEQ ID NO: 2818 - DNA, 200 bp, Kochia scoparia
tttaaaaaaagaaagatcactaatatttttttggaaaaaaattatattgaaaaagctaatcactattgtaagaatattgaccttcataaaaaaaaattaggaatggaataattaactttgttagtgatttacatcaataaaggataaaacaaatgggagaataagttcgagctatttttttttaaaattatatatctcta

SEQ ID NO: 2819 - DNA, 200 bp, Kochia scoparia
tattagtgatctttctttttttaaaaatggtagcactagcacaccaacactctcacaaattcaaccacaacaacccatgtttttgatttgcccaatttcttcttcaccaacccccttctctcttccacctaattttggttggtgaatccttcttctcattctctctcctaaaaagaagcttaaacccatcgtcaatcata

SEQ ID NO: 2820 - DNA, 200 bp, Kochia scoparia
tatgattgacgatgggtttaagcttctttttaggagagagaatgagaagaaggattcaccaaccaaaattaggtggaagagagaagggggttggtgaagaagaaattgggcaaatcaaaaacatgggttgttgtggttgaatttgtgagagtgttggtgtgctagtgctaccatttttaaaaaaagaaagatcactaata

SEQ ID NO: 2821 - DNA, 200 bp, Kochia scoparia
aagcttaaacccatcgtcaatcatatagtattagccatcaaaaacaacaagagagagaagaaacaatggctcaagctaccacctttaacaatggtgtcaaaaatggtcatcaattatgcgccaatttaccaaaaacccacttgcccaaatctcaaaaagctgtcaaatttggatcaaacttgagattttctccaaagttg

SEQ ID NO: 2822 - DNA, 200 bp, Kochia scoparia
caactttggagaaaatctcaagtttgatccaaatttgacagctttttgagatttgggcaagtgggtttttggtaaattggcgcataattgatgaccatttttgacaccattgttaaaggtggtagcttgagccattgtttcttctctctcttgttgtttttgatggctaatactatatgattgacgatgggtttaagctt

SEQ ID NO: 2823 - DNA, 200 bp, Kochia scoparia
aaacttgagattttctccaaagttgaagtctttcaacaatgaaagagtttctgggaaatcatcagttgtttttaaggttcatgcttcagttgctgctgctccctcaacttccccagaaattgtgttgcaacccattaaggagatttctggcactgttcaattgcctggttctaagtctttatctaatcgaattcttcttt

SEQ ID NO: 2824 - DNA, 200 bp, Kochia scoparia
aaagaagaattcgattagataaagacttagaaccaggcaattgaacagtgccagaaatctccttaatgggttgcaacacaatttctggggaagttgagggagcagcagcaactgaagcatgaaccttaaaaacaactgatgatttcccagaaactctttcattgttgaaagacttcaactttggagaaaatctcaagttt

SEQ ID NO: 2825 - DNA, 200 bp, Kochia scoparia
tctttatctaatcgaattcttcttttagctgctctttctgaggtacttttcgattgtttgatttcatcttttaccctgaatttggcgtttgtttaatgcagtttttgtgttttgaatctttgtaatttatgttaagttttaaaagattgatgcttcttgtttctcttgttgtttgtgcattggttgttggattggtatca

SEQ ID NO: 2826 - DNA, 200 bp, Kochia scoparia
tgataccaatccaacaaccaatgcacaaacaacaagagaaacaagaagcatcaatcttttaaaacttaacataaattacaaagattcaaaacacaaaaactgcattaaacaaacgccaaattcagggtaaaagatgaaatcaaacaatcgaaaagtacctcagaaagagcagctaaaagaagaattcgattagataaaga

SEQ ID NO: 2827 - DNA, 200 bp, Kochia scoparia
tgcattggttgttggattggtatcattgagaaatatgtatgcattagtaaaaattggtgtgttttgtgtagttttgcattaagttgtttaattgatatcattgagaaattgggttcagtacattgtttgactttggaatataaaaattggtggaaaaaaaacagcagatttttaacaaatgattgttatgtgaagatttg

SEQ ID NO: 2828 - DNA, 200 bp, Kochia scoparia
caaatcttcacataacaatcatttgttaaaaatctgctgttttttttccaccaatttttatattccaaagtcaaacaatgtactgaacccaatttctcaatgatatcaattaaacaacttaatgcaaaactacacaaaacacaccaatttttactaatgcatacatatttctcaatgataccaatccaacaaccaatgca

SEQ ID NO: 2829 - DNA, 200 bp, Kochia scoparia
caaatgattgttatgtgaagatttgttatcatataatggaggatgaaagtcctgaagttgtatgaactagatgataaaacctcactttcactgatttcggggtggacaatcaaagaaccttgatcgagtaggagcaaaatgacaccctgaacatagatgaacaggcttcataatatatgtattcacttgatgctttcggt

SEQ ID NO: 2830 - DNA, 200 bp, Kochia scoparia
accgaaagcatcaagtgaatacatatattatgaagcctgttcatctatgttcagggtgtcattttgctcctactcgatcaaggttctttgattgtccaccccgaaatcagtgaaagtgaggttttatcatctagttcatacaacttcaggactttcatcctccattatatgataacaaatcttcacataacaatcatttg

SEQ ID NO: 2831 - DNA, 200 bp, Kochia scoparia
tatgtattcacttgatgctttcggttacctcgaactgctgatgaggttgaggaaattgggatgtgtggtgcactttttcattttggtggcaagaatgcaagccttatggtacggcttgggagcgatcactgattagttggctcaagcttgacttttctagggagactatctcgaggaaggtggtttagtttaatacggtg

SEQ ID NO: 2832 - DNA, 200 bp, Kochia scoparia
caccgtattaaactaaaccaccttcctcgagatagtctccctagaaaagtcaagcttgagccaactaatcagtgatcgctcccaagccgtaccataaggcttgcattcttgccaccaaaatgaaaaagtgcaccacacatcccaatttcctcaacctcatcagcagttcgaggtaaccgaaagcatcaagtgaatacata

SEQ ID NO: 2833 - DNA, 200 bp, Kochia scoparia
gaaggtggtttagtttaatacggtgtacagtagtcgaatcctcacaaatcacaactcaaatccaagtaaaagggacaactacacatgaaactcagattagttcatttatcaatacctcaagaacatacttaaggaaccaagtacaatttcttctctagatattgaaaggggaggaagtgatataaaaacctaaactcttg

SEQ ID NO: 2834 - DNA, 200 bp, Kochia scoparia
caagagtttaggtttttatatcacttcctcccctttcaatatctagagaagaaattgtacttggttccttaagtatgttcttgaggtattgataaatgaactaatctgagtttcatgtgtagttgtcccttttacttggatttgagttgtgatttgtgaggattcgactactgtacaccgtattaaactaaaccaccttc

SEQ ID NO: 2835 - DNA, 200 bp, Kochia scoparia
agtgatataaaaacctaaactcttgtcaggccacacttaaaggtccacatcatataccccagaactataggttaaagacatacagtacataagaattacgtcgatatgttgaaagaactgtcagattctaacataattgcacacaagcattcctctacaatctgagtttaacgaaattcccatcgcctgcttgcaacaat

SEQ ID NO: 2836 - DNA, 200 bp, Kochia scoparia
attgttgcaagcaggcgatgggaatttcgttaaactcagattgtagaggaatgcttgtgtgcaattatgttagaatctgacagttctttcaacatatcgacgtaattcttatgtactgtatgtctttaacctatagttctggggtatatgatgtggacctttaagtgtggcctgacaagagtttaggtttttatatcact

SEQ ID NO: 2837 - DNA, 200 bp, Kochia scoparia
attcccatcgcctgcttgcaacaatgggcatcgtaagtccattcactagcaccttcatcttcaccttcaccttcacttgacccagatggcacattgtagtgcaatttgaaaaactattctgagaacttacataaccagcctttgttcatagttacagtccttcgaatcctactccttaggcatgcacaatttcttcctat

SEQ ID NO: 2838 - DNA, 200 bp, Kochia scoparia
ataggaagaaattgtgcatgcctaaggagtaggattcgaaggactgtaactatgaacaaaggctggttatgtaagttctcagaatagtttttcaaattgcactacaatgtgccatctgggtcaagtgaaggtgaaggtgaagatgaaggtgctagtgaatggacttacgatgcccattgttgcaagcaggcgatgggaat

SEQ ID NO: 2839 - DNA, 200 bp, Kochia scoparia
ttaggcatgcacaatttcttcctatcaataaggagcttttaggttctcaaaactgaggtgggaaggaaagttgagaatagtatgcatttaagtttgttttttcatttttcgttcctgaacaactacacatgtctcctgtagatggactttggtactagtgtaattctgtgtcagtctcatgtctgctgcgtttttgcacc

SEQ ID NO: 2840 - DNA, 200 bp, Kochia scoparia
ggtgcaaaaacgcagcagacatgagactgacacagaattacactagtaccaaagtccatctacaggagacatgtgtagttgttcaggaacgaaaaatgaaaaaacaaacttaaatgcatactattctcaactttccttcccacctcagttttgagaacctaaaagctccttattgataggaagaaattgtgcatgcctaa

SEQ ID NO: 2841 - DNA, 200 bp, Kochia scoparia
ctcatgtctgctgcgtttttgcaccctccctttttctttgaccttgtgttgtcctattttctaaagtttcaacaacctaaccaaatttatgctgcagggtacaacagtacttgacaacttgctatatagtgatgatattcgctatatgttggatgctctaagaactcttgggctcaacgtagaggatgataataaggcca

SEQ ID NO: 2842 - DNA, 200 bp, Kochia scoparia
tggccttattatcatcctctacgttgagcccaagagttcttagagcatccaacatatagcgaatatcatcactatatagcaagttgtcaagtactgttgtaccctgcagcataaatttggttaggttgttgaaactttagaaaataggacaacacaaggtcaaagaaaaagggagggtgcaaaaacgcagcagacatgag

SEQ ID NO: 2843 - DNA, 200 bp, Kochia scoparia
aacgtagaggatgataataaggccaaaagggcaatcgtggagggttgtggcggtctatttcctgctggtaaagagaataggagtgagattgaacttttccttggaaacgcgggaacggcaatgcgcccattgacagctgcagttgccgttgctggaggaaattccaggttagtgaataacgatttctatgtggatgtaat

SEQ ID NO: 2844 - DNA, 200 bp, Kochia scoparia
attacatccacatagaaatcgttattcactaacctggaatttcctccagcaacggcaactgcagctgtcaatgggcgcattgccgttcccgcgtttccaaggaaaagttcaatctcactcctattctctttaccagcaggaaatagaccgccacaaccctccacgattgcccttttggccttattatcatcctctacgtt

SEQ ID NO: 2845 - DNA, 200 bp, Kochia scoparia
ataacgatttctatgtggatgtaatactgataggtttgtgtaaggcttatgatatagttgcacgataggtctactagaaagatgctattcattgtgaaaaaatatgttagattaatgtttgtgaaatgaaaatttaaagagattgtaactgtggaagtattgctgatggatgaacacaaactagatataattaaaaggct

SEQ ID NO: 2846 - DNA, 200 bp, Kochia scoparia
agccttttaattatatctagtttgtgttcatccatcagcaatacttccacagttacaatctctttaaattttcatttcacaaacattaatctaacatattttttcacaatgaatagcatctttctagtagacctatcgtgcaactatatcataagccttacacaaacctatcagtattacatccacatagaaatcgttat

SEQ ID NO: 2847 - DNA, 200 bp, Kochia scoparia
acaaactagatataattaaaaggctaacagcgtgtattatctcgttaatatctgatgaactttttcagatttatctaaacataagctattgtattgggattaggataattctcgtagtccagacatcctgtcatggagtaaggattcttaagactatggatggttaattcaaactctggcaatcatcttttggtagtgag

SEQ ID NO: 2848 - DNA, 200 bp, Kochia scoparia
ctcactaccaaaagatgattgccagagtttgaattaaccatccatagtcttaagaatccttactccatgacaggatgtctggactacgagaattatcctaatcccaatacaatagcttatgtttagataaatctgaaaaagttcatcagatattaacgagataatacacgctgttagccttttaattatatctagtttgt

SEQ ID NO: 2849 - DNA, 200 bp, Kochia scoparia
ctggcaatcatcttttggtagtgagaaaactgctgtcttttttagaatcttctttatccataaactcttaaatcctaaataaaccggaagcaatcttggtcgttgatttttgagatgtatggtcaagatgtgcataagtttaatagtaaatgtgcatatttttttggtttttgcacattcacaggaaaattcgtgcacat

SEQ ID NO: 2850 - DNA, 200 bp, Kochia scoparia
atgtgcacgaattttcctgtgaatgtgcaaaaaccaaaaaaatatgcacatttactattaaacttatgcacatcttgaccatacatctcaaaaatcaacgaccaagattgcttccggtttatttaggatttaagagtttatggataaagaagattctaaaaaagacagcagttttctcactaccaaaagatgattgccag

SEQ ID NO: 2851 - DNA, 200 bp, Kochia scoparia
cattcacaggaaaattcgtgcacatttacgtacaaaaatttgcacatttacttttttcatgaaataaatcttgatccttcattcaaaatccaacgatcaaaattgcttctcacgtttctcattttaagggtgcttctcatttgatcctaaatctatatacatatgtaagtaccttgaatgccatggaattgaaattttaa

SEQ ID NO: 2852 - DNA, 200 bp, Kochia scoparia
ttaaaatttcaattccatggcattcaaggtacttacatatgtatatagatttaggatcaaatgagaagcacccttaaaatgagaaacgtgagaagcaattttgatcgttggattttgaatgaaggatcaagatttatttcatgaaaaaagtaaatgtgcaaatttttgtacgtaaatgtgcacgaattttcctgtgaatg

SEQ ID NO: 2853 - DNA, 200 bp, Kochia scoparia
gaatgccatggaattgaaattttaaattatgtgttggttgtgaatggggttaatgaagtagatagagtaggctgacaaatattccaaggggtacctacagctactcttggtcactaagtcattgttctgtttttagattttaattgctttcccttatggttttttcagttatgtacttgatggagtgccaagaatgaggg

SEQ ID NO: 2854 - DNA, 200 bp, Kochia scoparia
ccctcattcttggcactccatcaagtacataactgaaaaaaccataagggaaagcaattaaaatctaaaaacagaacaatgacttagtgaccaagagtagctgtaggtaccccttggaatatttgtcagcctactctatctacttcattaaccccattcacaaccaacacataatttaaaatttcaattccatggcattc

SEQ ID NO: 2855 - DNA, 200 bp, Kochia scoparia
cttgatggagtgccaagaatgagggagcgacccattggggatctggtagctggtctgaagcaactgggtgcagatgttgactgttttcttggcacaaattgtcctcctgtaagagtaaatgctaaaggaggtcttccagggggcaaggtagagtaaatttcttgtagattaactttgttgataattcactcattaatata

SEQ ID NO: 2856 - DNA, 200 bp, Kochia scoparia
tatattaatgagtgaattatcaacaaagttaatctacaagaaatttactctaccttgccccctggaagacctcctttagcatttactcttacaggaggacaatttgtgccaagaaaacagtcaacatctgcacccagttgcttcagaccagctaccagatccccaatgggtcgctccctcattcttggcactccatcaag

SEQ ID NO: 2857 - DNA, 200 bp, Kochia scoparia
tgttgataattcactcattaatatatcaatgagacatcctcaaaaaataactctgtcctgttttcctgtcattaagctctgttacataacttacattattttaaagcattttgatggaatgtatctgcaggtcaagctctcaggatcagttagtagccaatatcttactgcgctactcatggctacccctttggctcttg

SEQ ID NO: 2858 - DNA, 200 bp, Kochia scoparia
caagagccaaaggggtagccatgagtagcgcagtaagatattggctactaactgatcctgagagcttgacctgcagatacattccatcaaaatgctttaaaataatgtaagttatgtaacagagcttaatgacaggaaaacaggacagagttattttttgaggatgtctcattgatatattaatgagtgaattatcaaca

SEQ ID NO: 2859 - DNA, 200 bp, Kochia scoparia
ctcatggctacccctttggctcttggagatgtggaggttgaaatcattgataaattgatttctgtcccttacgtagagatgacaataaagttaatggaacggtttggagtgtcaatagagcatactgctagctgggacaggtttttgatccgaggtggtcagaagtacaagtaagtcactcttcttttacttgcatgtat

SEQ ID NO: 2860 - DNA, 200 bp, Kochia scoparia
atacatgcaagtaaaagaagagtgacttacttgtacttctgaccacctcggatcaaaaacctgtcccagctagcagtatgctctattgacactccaaaccgttccattaactttattgtcatctctacgtaagggacagaaatcaatttatcaatgatttcaacctccacatctccaagagccaaaggggtagccatgag

SEQ ID NO: 2861 - DNA, 200 bp, Kochia scoparia
tcactcttcttttacttgcatgtattgaacgtcattccattggtagactgatgcagcattaataatatgtcagatctcctggaaatgcatttgttgagggtgatgcttcaagtgccagttacttcttagcaggggccgcgatcactggtgggactgtgactgttgagggttgtggaacaagcagtttgcaggtatgatcc

SEQ ID NO: 2862 - DNA, 200 bp, Kochia scoparia
ggatcatacctgcaaactgcttgttccacaaccctcaacagtcacagtcccaccagtgatcgcggcccctgctaagaagtaactggcacttgaagcatcaccctcaacaaatgcatttccaggagatctgacatattattaatgctgcatcagtctaccaatggaatgacgttcaatacatgcaagtaaaagaagagtga

SEQ ID NO: 2863 - DNA, 57 bp, Kochia scoparia; identical to SEQ ID NO: 101

SEQ ID NO: 2864 - DNA, 57 bp, Kochia scoparia
aatgtgcaaatttttgtacgtaaatgtgcacgaattttcctgtgaatgtgcaaaaac

SEQ ID NO: 2865 - DNA, 200 bp, Kochia scoparia
tcaccttcacttgacccagatggcacattgtagtgcaatttgaaaaactattctgagaacttacataaccagcctttgttcatagttacagtccttcgaatcctactccttaggcatgcacaatttcttcctatcaataaggagcttttaggttctcaaaactgaggtgggaaggaaagttgagaatagtatgcatttaa

SEQ ID NO: 2866 - DNA, 200 bp, Kochia scoparia
ttaaatgcatactattctcaactttccttcccacctcagttttgagaacctaaaagctccttattgataggaagaaattgtgcatgcctaaggagtaggattcgaaggactgtaactatgaacaaaggctggttatgtaagttctcagaatagtttttcaaattgcactacaatgtgccatctgggtcaagtgaaggtga

SEQ ID NO: 2867 - DNA, 200 bp, Kochia scoparia
aaagttgagaatagtatgcatttaagtttgttttttcatttttcgttccctgaacaactacacatgtctcctgtagatggactttggtactagtgtaattctgtgtcagtctcatgtctgctgcgtttttgcaccctccctttttctttgaccttgtgttgtcctattttctaaagtttcaacaacctaaccaaatttat

SEQ ID NO: 2868 - DNA, 200 bp, Kochia scoparia
ataaatttggttaggttgttgaaactttagaaaataggacaacacaaggtcaaagaaaaagggagggtgcaaaaacgcagcagacatgagactgacacagaattacactagtaccaaagtccatctacaggagacatgtgtagttgttcagggaacgaaaaatgaaaaaacaaacttaaatgcatactattctcaacttt

SEQ ID NO: 2869 - DNA, 200 bp, Kochia scoparia
gtttcaacaacctaaccaaatttatgctgcagggtacaacagtacttgacaacttgctatatagtgatgatattcgctatatgttggatgctctaagaactcttgggctcaacgtagaggatgataataaggccaaaagggcaatcgtggagggttgtggcggtctatttcctgctggtaaagagaataggagtgagatt

SEQ ID NO: 2870 - DNA, 200 bp, Kochia scoparia
aatctcactcctattctctttaccagcaggaaatagaccgccacaaccctccacgattgcccttttggccttattatcatcctctacgttgagcccaagagttcttagagcatccaacatatagcgaatatcatcactatatagcaagttgtcaagtactgttgtaccctgcagcataaatttggttaggttgttgaaac

SEQ ID NO: 2871 - DNA, 200 bp, Kochia scoparia
tggtaaagagaataggagtgagattgaacttttccttggaaacgcgggaacggcaatgcgcccattgacagctgcagttgccgttgctggaggaaattccaggttagtgaataacgatttctatgtggatgtaatactgataggtttgtgtaaggcttatgatatagttgcacgataggtctactagaaagatgctattc

SEQ ID NO: 2872 - DNA, 200 bp, Kochia scoparia
gaatagcatctttctagtagacctatcgtgcaactatatcataagccttacacaaacctatcagtattacatccacatagaaatcgttattcactaacctggaatttcctccagcaacggcaactgcagctgtcaatgggcgcattgccgttcccgcgtttccaaggaaaagttcaatctcactcctattctctttacca

SEQ ID NO: 2873 - DNA, 200 bp, Kochia scoparia
taggtctactagaaagatgctattcattgtgaaaaatatgttagattaatgtttgtgaaatgaaaatttaaagagattgtaactgtggaagtattgctgatggatgaacacaaactagatataattaaaaggctaacagcgtgtattatctcgttaatatctgatgaactttttcagatttatctaaacataagctattg

SEQ ID NO: 2874 - DNA, 200 bp, Kochia scoparia
caatagcttatgtttagataaatctgaaaaagttcatcagatattaacgagataatacacgctgttagccttttaattatatctagtttgtgttcatccatcagcaatacttccacagttacaatctctttaaattttcatttcacaaacattaatctaacatatttttcacaatgaatagcatctttctagtagaccta

SEQ ID NO: 2875 - DNA, 200 bp, Kochia scoparia
agatttatctaaacataagctattgtattgggattaggataattctcgtagtccagacatcctgtcatggagtaaggattcttaagactatggatggttaattcaaactctggcaatcatcttttggtagtgagaaaactgctgtcttttttagaatcttctttatccataaactcttaaatcctaaataaaccggaagc

SEQ ID NO: 2876 - DNA, 200 bp, Kochia scoparia
gcttccggtttatttaggatttaagagtttatggataaagaagattctaaaaaagacagcagttttctcactaccaaaagatgattgccagagtttgaattaaccatccatagtcttaagaatccttactccatgacaggatgtctggactacgagaattatcctaatcccaatacaatagcttatgtttagataaatct

SEQ ID NO: 2877 - DNA, 200 bp, Kochia scoparia
cttaaatcctaaataaaccggaagcaatcttggtcgttgatttttgagatgtatggtcaagatgtgcataagtttaatagtaaatgtgcatatttttttggtttttgcacattcacaggaaaattcgtgcacatttacgtacaaaaatttgcacatttacttttttcatgaaataaatcttgatccttcattcaaaatcc

SEQ ID NO: 2878 - DNA, 200 bp, Kochia scoparia
ggattttgaatgaaggatcaagatttatttcatgaaaaaagtaaatgtgcaaatttttgtacgtaaatgtgcacgaattttcctgtgaatgtgcaaaaaccaaaaaaatatgcacatttactattaaacttatgcacatcttgaccatacatctcaaaaatcaacgaccaagattgcttccggtttatttaggatttaag

SEQ ID NO: 2879 - DNA, 200 bp, Kochia scoparia
aatcttgatccttcattcaaaatccaacgatcaaaattgcttctcacgtttctcattttaagggtgcttctcatttgatcctaaatctatatacatatgtaagtaccttgaatgccatggaattgaaattttaaattatgtgttggttgtgaatggggttaatgaagtagatagagtaggctgacaaatattccaagggg

SEQ ID NO: 2880 - DNA, 200 bp, Kochia scoparia
ccccttggaatatttgtcagcctactctatctacttcattaaccccattcacaaccaacacataatttaaaatttcaattccatggcattcaaggtacttacatatgtatatagatttaggatcaaatgagaagcacccttaaaatgagaaacgtgagaagcaattttgatcgttggattttgaatgaaggatcaagatt

SEQ ID NO: 2881 - DNA, 200 bp, Kochia scoparia
gtaggctgacaaatattccaaggggtacctacagctactcttggtcactaagtcattgttctgtttttagattttaattgctttcccttatggttttttcagttatgtacttgatggagtgccaagaatgagggagcgacccattggggatctggtagctggtctgaagcaactgggtgcagatgttgactgttttcttg

SEQ ID NO: 2882 - DNA, 200 bp, Kochia scoparia
caagaaaacagtcaacatctgcacccagttgcttcagaccagctaccagatccccaatgggtcgctccctcattcttggcactccatcaagtacataactgaaaaaaccataagggaaagcaattaaaatctaaaaacagaacaatgacttagtgaccaagagtagctgtaggtaccccttggaatatttgtcagcctac

SEQ ID NO: 2883 - DNA, 200 bp, Kochia scoparia
ggtgcagatgttgactgttttcttggcacaaattgtcctcctgtaagagtaaatgctaaaggaggtcttccagggggcaaggtagagtaaatttcttgtagattaactttgttgataattcactcattaatatatcaatgagacatcctcaaaaaataactctgtcctgttttcctgtcattaagctctgttacataact

SEQ ID NO: 2884 - DNA, 200 bp, Kochia scoparia
agttatgtaacagagcttaatgacaggaaaacaggacagagttattttttgaggatgtctcattgatatattaatgagtgaattatcaacaaagttaatctacaagaaatttactctaccttgccccctggaagacctcctttagcatttactcttacaggaggacaatttgtgccaagaaaacagtcaacatctgcacc

SEQ ID NO: 2885 - DNA, 200 bp, Kochia scoparia
tgtcattaagctctgttacataacttacattattttaaagcattttgatggaatgtatctgcaggtcaagctctcaggatcagttagtagccaatatcttactgcgctactcatggctacccctttggctcttggagatgtggaggttgaaatcattgataaattgatttctgtcccttacgtagagatgacaataaagt

SEQ ID NO: 2886 - DNA, 200 bp, Kochia scoparia
actttattgtcatctctacgtaagggacagaaatcaatttatcaatgatttcaacctccacatctccaagagccaaaggggtagccatgagtagcgcagtaagatattggctactaactgatcctgagagcttgacctgcagatacattccatcaaaatgctttaaaataatgtaagttatgtaacagagcttaatgaca

SEQ ID NO: 2887 - DNA, 200 bp, Kochia scoparia
ccttacgtagagatgacaataaagttaatggaacggtttggagtgtcaatagagcatactgctagctgggacaggtttttgatccgaggtggtcagaagtacaagtaagtcactcttcttttacttgcatgtattgaacgtcattccattggtagactgatgcagcattaataatatgtcagatctcctggaaatgcatt

SEQ ID NO: 2888 - DNA, 200 bp, Kochia scoparia
aatgcatttccaggagatctgacatattattaatgctgcatcagtctaccaatggaatgacgttcaatacatgcaagtaaaagaagagtgacttacttgtacttctgaccacctcggatcaaaaacctgtcccagctagcagtatgctctattgacactccaaaccgttccattaactttattgtcatctctacgtaagg

SEQ ID NO: 2889 - DNA, 200 bp, Kochia scoparia
atgtcagatctcctggaaatgcatttgttgagggtgatgcttcaagtgccagttacttcttagcaggggccgcgatcactggtgggactgtgactgttgagggttgtggaacaagcagtttgcaggtatgatccaaagcctcacttcaataaattttcaagtacacattcgttttacttcctccgttttgtattactcgc

SEQ ID NO: 2890 - DNA, 200 bp, Kochia scoparia
gcgagtaatacaaaacggaggaagtaaaacgaatgtgtacttgaaaatttattgaagtgaggctttggatcatacctgcaaactgcttgttccacaaccctcaacagtcacagtcccaccagtgatcgcggcccctgctaagaagtaactggcacttgaagcatcaccctcaacaaatgcatttccaggagatctgacat

SEQ ID NO: 2891 - DNA, 200 bp, Kochia scoparia
acttcctccgttttgtattactcgcaccggtttccattttgggaaatttgcgaatacttgcaccactttgctttattcccttttttggcaatttattttgtttgaaatgaccattttagccttattgtttttccccacatggtgggatcaaaggaattaacaccataaaacacacctcctttataccccaccaacttaat

SEQ ID NO: 2892 - DNA, 200 bp, Kochia scoparia
attaagttggtggggtataaaggaggtgtgttttatggtgttaattcctttgatcccaccatgtggggaaaaacaataaggctaaaatggtcatttcaaacaaaataaattgccaaaaaagggaataaagcaaagtggtgcaagtattcgcaaatttcccaaaatggaaaccggtgcgagtaatacaaaacggaggaagt

SEQ ID NO: 2893 - DNA, 200 bp, Kochia scoparia
ctcctttataccccaccaacttaatcacactacccttccctcaactaattataccaacaaaaaaacgccttggagtccgcaataatgaaagtggtgcgagtaatataaaacggaggaagtatttattttttagattaactgttgtaaccattttttggttaattttgaggctaaagtatggccttttgacaattaacttt

SEQ ID NO: 2894 - DNA, 200 bp, Kochia scoparia
aaagttaattgtcaaaaggccatactttagcctcaaaattaaccaaaaaatggttacaacagttaatctaaaaaataaatacttcctccgttttatattactcgcaccactttcattattgcggactccaaggcgtttttttgttggtataattagttgagggaagggtagtgtgattaagttggtggggtataaaggag

SEQ ID NO: 2895 - DNA, 200 bp, Kochia scoparia
gtatggccttttgacaattaactttcaatattaatctctaatgtggtgtaaagtcatccattttaatatcagacaattgtgtttgactcccaaaaaaggataatttacttcttattgttttgtgactgccaaaaaggatcacttgaatgtcatggattgtttaatcacctatttaggcattgttgtgttgtgattcacct

SEQ ID NO: 2896 - DNA, 200 bp, Kochia scoparia
aggtgaatcacaacacaacaatgcctaaataggtgattaaacaatccatgacattcaagtgatcctttttggcagtcacaaaacaataagaagtaaattatccttttttgggagtcaaacacaattgtctgatattaaaatggatgactttacaccacattagagattaatattgaaagttaattgtcaaaaggccatac

SEQ ID NO: 2897 - DNA, 200 bp, Kochia scoparia
ggcattgttgtgttgtgattcacctcatctttaggtccaatagattttggctgaatcttacttgtgactgccaaaaaggatcactgacaatttacttgtttaacggattttactcagggtgatgttaaattcgcggaggttcttgagaagatgggttgcaaagttacatggacagagaccagtgtcactgtaactggacc

SEQ ID NO: 2898 - DNA, 200 bp, Kochia scoparia
ggtccagttacagtgacactggtctctgtccatgtaactttgcaacccatcttctcaagaacctccgcgaatttaacatcaccctgagtaaaatccgttaaacaagtaaattgtcagtgatcctttttggcagtcacaagtaagattcagccaaaatctattggacctaaagatgaggtgaatcacaacacaacaatgcc

SEQ ID NO: 2899 - DNA, 200 bp, Kochia scoparia
agaccagtgtcactgtaactggaccgcccagggactcatctggaagaaaacatttgcgtgccatcgatgttaacatgaacaaaatgccagatgttgcgatgactcttgctgttgttgccctatatgcagatgggcccacagctatcagagacggtattaactcctttctgatacattacacttttcttgtgctatatatt

SEQ ID NO: 2900 - DNA, 200 bp, Kochia scoparia
aatatatagcacaagaaaagtgtaatgtatcagaaaggagttaataccgtctctgatagctgtgggcccatctgcatatagggcaacaacagcaagagtcatcgcaacatctggcattttgttcatgttaacatcgatggcacgcaaatgttttcttccagatgagtccctgggcggtccagttacagtgacactggtct

SEQ ID NO: 2901 - DNA, 200 bp, Kochia scoparia
ttacacttttcttgtgctatatattgtttcaaatttgataattcgatcatgcttcaaattttgcacacagccgtaatccatggttataaaatgactatgacacttgtcttgttactgaaaagtgcatacagtaacaaagctgatgttacttcttagtttactctaataatggttggacggtcactggcgcacatccccat

SEQ ID NO: 2902 - DNA, 200 bp, Kochia scoparia
atggggatgtgcgccagtgaccgtccaaccattattagagtaaactaagaagtaacatcagctttgttactgtatgcacttttcagtaacaagacaagtgtcatagtcattttataaccatggattacggctgtgtgcaaaatttgaagcatgatcgaattatcaaatttgaaacaatatatagcacaagaaaagtgtaa

SEQ ID NO: 2903 - DNA, 200 bp, Kochia scoparia
gacggtcactggcgcacatccccatggttggaagttgtgaatattgttgtcataatggcttatggagcatcttttggtacacttcaggagtaaaagaccactagtccagtatagggttaatcacctctagaactagttagtcacatatactcggaaaattattcatattttgtggttacatgcgttcgtttatctgcatc

SEQ ID NO: 2904 - DNA, 200 bp, Kochia scoparia
gatgcagataaacgaacgcatgtaaccacaaaatatgaataattttccgagtatatgtgactaactagttctagaggtgattaaccctatactggactagtggtcttttactcctgaagtgtaccaaaagatgctccataagccattatgacaacaatattcacaacttccaaccatggggatgtgcgccagtgaccgtc

SEQ ID NO: 2905 - DNA, 200 bp, Kochia scoparia
ttacatgcgttcgtttatctgcatcttgcctagtgtctcctcttgaaatcattcatatatgttctttttttccccttcatctgttacatgttcaaaatatgcttacaacgaaattgggtaacttgaccagttgctagctggagagtgaaggaaacagaaaggatgattgccatctgtacagaactcagaaaggttagcca

SEQ ID NO: 2906 - DNA, 200 bp, Kochia scoparia
tggctaacctttctgagttctgtacagatggcaatcatcctttctgtttccttcactctccagctagcaactggtcaagttacccaatttcgttgtaagcatattttgaacatgtaacagatgaaggggaaaaaaagaacatatatgaatgatttcaagaggagacactaggcaagatgcagataaacgaacgcatgtaa

SEQ ID NO: 2907 - DNA, 200 bp, Kochia scoparia
gtacagaactcagaaaggttagccacattctttaatcttgtagtaaaaaataaagttgcctgtttcatgtaagttgatgttaattcggacttttaaaattttcagcttggagcaacagttgaggaaggacctgattactgtgtgatcactccaccagaaaaactaaacgtaaccgccatcgacacatatgatgatcatcg

SEQ ID NO: 2908 - DNA, 200 bp, Kochia scoparia
cgatgatcatcatatgtgtcgatggcggttacgtttagtttttctggtggagtgatcacacagtaatcaggtccttcctcaactgttgctccaagctgaaaattttaaaagtccgaattaacatcaacttacatgaaacaggcaactttattttttactacaagattaaagaatgtggctaacctttctgagttctgtac

SEQ ID NO: 2909 - DNA, 200 bp, Kochia scoparia
ccatcgacacatatgatgatcatcgaatggccatggcattctctcttgctgcctgtgctgatgttcctgtcactattaaggacccaggctgcacccgcaagaccttcccagactactttgacgtcttggaacggtttgccaagcattgagcggctatctgcagatttttcataaagtatgcacgaaagtttcaatttaag

SEQ ID NO: 2910 - DNA, 200 bp, Kochia scoparia
cttaaattgaaactttcgtgcatactttatgaaaaatctgcagatagccgctcaatgcttggcaaaccgttccaagacgtcaaagtagtctgggaaggtcttgcgggtgcagcctgggtccttaatagtgacaggaacatcagcacaggcagcaagagagaatgccatggccattcgatgatcatcatatgtgtcgatgg

SEQ ID NO: 2911 - DNA, 200 bp, Kochia scoparia
gtatgcacgaaagtttcaatttaagaagataccgagttgattatatgctttccgcataagttattgtcacattttttgtattatgtttgtaagatcttaggcaataagatatactgttagaaattatgtgtatctgattatttagagatgtatacttgggtcagttgaaattgtacgagaaaggtctggatttcgaaaaa

SEQ ID NO: 2912 - DNA, 200 bp, Kochia scoparia
tttttcgaaatccagacctttctcgtacaatttcaactgacccaagtatacatctctaaataatcagatacacataatttctaacagtatatcttattgcctaagatcttacaaacataatacaaaaaatgtgacaataacttatgcggaaagcatataatcaactcggtatcttcttaaattgaaactttcgtgcatac

SEQ ID NO: 2913 - DNA, 200 bp, Kochia scoparia
cgagaaaggtctggatttcgaaaaaaatgtgatccagacattagtgtggtctgaactgaagcaagtactccctccgtctcataattctcacaactcttgctattatttgtgagaaataaaatattcaagtgttgcgagaattgtgtgacagcgggagtagcaacttttcaagtttggaattaattttgtgatgtgagttt

SEQ ID NO: 2914 - DNA, 200 bp, Kochia scoparia
aaactcacatcacaaaattaattccaaacttgaaaagttgctactcccgctgtcacacaattctcgcaacacttgaatattttatttctcacaaataatagcaagagttgtgagaattatgagacggagggagtacttgcttcagttcagaccacactaatgtctggatcacatttttttcgaaatccagacctttctcg

SEQ ID NO: 2915 - DNA, 200 bp, Kochia scoparia
ggaattaattttgtgatgtgagttttttgtgtattctttgttttccatcaaaccctcctccaaagtacaaacccaattcatggtatggttgatgcaacagcaatatgtcaaaatcagtgtttgtgatgttggcttctctacttcattatctcttcttgttcagtatgatttcgcaatctcttcccgtcaaaatcccttct

SEQ ID NO: 2916 - DNA, 200 bp, Kochia scoparia
agaagggattttgacgggaagagattgcgaaatcatactgaacaagaagagataatgaagtagagaagccaacatcacaaacactgattttgacatattgctgttgcatcaaccataccatgaattgggtttgtactttggaggagggtttgatggaaaacaaagaatacacaaaaaactcacatcacaaaattaattcc

SEQ ID NO: 2917 - DNA, 200 bp, Kochia scoparia
atctcttcccgtcaaaatcccttctcctctgataatcgcagaaatcgtgtcttcccctcggtgtgtatccacctcttaaaaatttgttgagagttgaaatgtgctgccactggattcatcctttagggcgaattttgaacggattttaggtggttaggattcaacccctgtcaattatagttacgggaattagacacgcg

SEQ ID NO: 2918 - DNA, 200 bp, Kochia scoparia
cgcgtgtctaattcccgtaactataattgacaggggttgaatcctaaccacctaaaatccgttcaaaattcgccctaaaggatgaatccagtggcagcacatttcaactctcaacaaatttttaagaggtggatacacaccgaggggaagacacgatttctgcgattatcagaggagaagggattttgacgggaagagat

SEQ ID NO: 2919 - DNA, 200 bp, Kochia scoparia
ttttcatgaaataaatcttgatccttcattcaaaatccaacgatcaaaattgcttctcacgtttctcattttaagggtgcttctcatttgatcctaaatctatatacatatgtaagtaccttgaatgccatggaattgaaattttaaattatgtgttggttgtgaatggggttaatgaagtagatagagtaggctgacaa

SEQ ID NO: 2920 - DNA, 200 bp, Kochia scoparia
ttgtcagcctactctatctacttcattaaccccattcacaaccaacacataatttaaaatttcaattccatggcattcaaggtacttacatatgtatatagatttaggatcaaatgagaagcacccttaaaatgagaaacgtgagaagcaattttgatcgttggattttgaatgaaggatcaagatttatttcatgaaaa

SEQ ID NO: 2921 - DNA, 200 bp, Kochia scoparia
tgaagtagatagagtaggctgacaaatattccaaggggtacctacagctactcttggtcactaagtcattgttctgtttttagattttaattgctttcccttatggttttttcagttatgtacttgatggagtgccaagaatgagggagcgacccattggggatctggtagctggtctgaagcaactgggtgcagatgtt

SEQ ID NO: 2922 - DNA, 200 bp, Kochia scoparia
aacatctgcacccagttgcttcagaccagctaccagatccccaatgggtcgctccctcattcttggcactccatcaagtacataactgaaaaaaccataagggaaagcaattaaaatctaaaaacagaacaatgacttagtgaccaagagtagctgtaggtaccccttggaatatttgtcagcctactctatctacttca

SEQ ID NO: 2923 - DNA, 200 bp, Kochia scoparia
tctgaagcaactgggtgcagatgttgactgttttcttggcacaaattgtcctcctgtaagagtaaatgctaaaggaggtcttccagggggcaaggtagagtaaatttcttgtagattaactttgttgataattcactcattaatatatcaatgagacatcctcaaaaaataactctgtcctgttttcctgtcattaagct

SEQ ID NO: 2924 - DNA, 200 bp, Kochia scoparia
agcttaatgacaggaaaacaggacagagttattttttgaggatgtctcattgatatattaatgagtgaattatcaacaaagttaatctacaagaaatttactctaccttgccccctggaagacctcctttagcatttactcttacaggaggacaatttgtgccaagaaaacagtcaacatctgcacccagttgcttcaga

SEQ ID NO: 2925 - DNA, 200 bp, Kochia scoparia
tgtcctgttttcctgtcattaagctctgttacataacttacattattttaaagcattttgatggaatgtatctgcaggtcaagctctcaggatcagttagtagccaatatcttactgcgctactcatggctacccctttggctcttggagatgtggaggttgaaatcattgataaattgatttctgtcccttacgtagag

SEQ ID NO: 2926 - DNA, 200 bp, Kochia scoparia
ctctacgtaagggacagaaatcaatttatcaatgatttcaacctccacatctccaagagccaaaggggtagccatgagtagcgcagtaagatattggctactaactgatcctgagagcttgacctgcagatacattccatcaaaatgctttaaaataatgtaagttatgtaacagagcttaatgacaggaaaacaggaca

SEQ ID NO: 2927 - DNA, 200 bp, Kochia scoparia
attgatttctgtcccttacgtagagatgacaataaagttaatggaacggtttggagtgtcaatagagcatactgctagctgggacaggtttttgatccgaggtggtcagaagtacaagtaagtcactcttcttttacttgcatgtattgaacgtcattccattggtagactgatgcagcattaataatatgtcagatctc

SEQ ID NO: 2928 - DNA, 200 bp, Kochia scoparia
gagatctgacatattattaatgctgcatcagtctaccaatggaatgacgttcaatacatgcaagtaaaagaagagtgacttacttgtacttctgaccacctcggatcaaaaacctgtcccagctagcagtatgctctattgacactccaaaccgttccattaactttattgtcatctctacgtaagggacagaaatcaat

SEQ ID NO: 2929 - DNA, 200 bp, Kochia scoparia
cagcattaataatatgtcagatctcctggaaatgcatttgttgagggtgatgcttcaagtgccagttacttcttagcaggggccgcgatcactggtgggactgtgactgttgagggttgtggaacaagcagtttgcaggtatgatccaaagcctcacttcaataaattttcaagtacacattcgttttacttcctccgtt

SEQ ID NO: 2930 - DNA, 200 bp, Kochia scoparia
aacggaggaagtaaaacgaatgtgtacttgaaaatttattgaagtgaggctttggatcatacctgcaaactgcttgttccacaaccctcaacagtcacagtcccaccagtgatcgcggcccctgctaagaagtaactggcacttgaagcatcaccctcaacaaatgcatttccaggagatctgacatattattaatgctg

SEQ ID NO: 2931 - DNA, 200 bp, Kochia scoparia
acacattcgttttacttcctccgttttgtattactcgcaccggtttccattttgggaaatttgcgaatacttgcaccactttgctttattcccttttttggcaatttattttgtttgaaatgaccattttagccttattgtttttccccacatggtgggatcaaaggaattaacaccataaaacacacctcctttatacc

SEQ ID NO: 2932 - DNA, 200 bp, Kochia scoparia
ggtataaaggaggtgtgttttatggtgttaattcctttgatcccaccatgtggggaaaaacaataaggctaaaatggtcatttcaaacaaaataaattgccaaaaaagggaataaagcaaagtggtgcaagtattcgcaaatttcccaaaatggaaaccggtgcgagtaatacaaaacggaggaagtaaaacgaatgtgt

SEQ ID NO: 2933 - DNA, 200 bp, Kochia scoparia
ccataaaacacacctcctttataccccaccaacttaatcacactacccttccctcaactaattataccaacaaaaaaacgccttggagtccgcaataatgaaagtggtgcgagtaatataaaacggaggaagtatttattttttagattaactgttgtaaccattttttggttaattttgaggctaaagtatggcctttt

SEQ ID NO: 2934 - DNA, 200 bp, Kochia scoparia
aaaaggccatactttagcctcaaaattaaccaaaaaatggttacaacagttaatctaaaaaataaatacttcctccgttttatattactcgcaccactttcattattgcggactccaaggcgtttttttgttggtataattagttgagggaagggtagtgtgattaagttggtggggtataaaggaggtgtgttttatgg

SEQ ID NO: 2935 - DNA, 200 bp, Kochia scoparia
ttttgaggctaaagtatggccttttgacaattaactttcaatattaatctctaatgtggtgtaaagtcatccattttaatatcagacaattgtgtttgactcccaaaaaaggataatttacttcttattgttttgtgactgccaaaaaggatcacttgaatgtcatggattgtttaatcacctatttaggcattgttgtg

SEQ ID NO: 2936 - DNA, 200 bp, Kochia scoparia
cacaacaatgcctaaataggtgattaaacaatccatgacattcaagtgatcctttttggcagtcacaaaacaataagaagtaaattatccttttttgggagtcaaacacaattgtctgatattaaaatggatgactttacaccacattagagattaatattgaaagttaattgtcaaaaggccatactttagcctcaaaa

SEQ ID NO: 2937 - DNA, 200 bp, Kochia scoparia
aatcacctatttaggcattgttgtgttgtgattcacctcatctttaggtccaatagattttggctgaatcttacttgtgactgccaaaaaggatcactgacaatttacttgtttaacggattttactcagggtgatgttaaattcgcggaggttcttgagaagatgggttgcaaagttacatggacagagaccagtgtca

SEQ ID NO: 2938 - DNA, 200 bp, Kochia scoparia
tgacactggtctctgtccatgtaactttgcaacccatcttctcaagaacctccgcgaatttaacatcaccctgagtaaaatccgttaaacaagtaaattgtcagtgatcctttttggcagtcacaagtaagattcagccaaaatctattggacctaaagatgaggtgaatcacaacacaacaatgcctaaataggtgatt

SEQ ID NO: 2939 - DNA, 200 bp, Kochia scoparia
gttacatggacagagaccagtgtcactgtaactggaccgcccagggactcatctggaagaaaacatttgcgtgccatcgatgttaacatgaacaaaatgccagatgttgcgatgactcttgctgttgttgccctatatgcagatgggcccacagctatcagagacggtattaactcctttctgatacattacacttttct

SEQ ID NO: 2940 - DNA, 200 bp, Kochia scoparia
agaaaagtgtaatgtatcagaaaggagttaataccgtctctgatagctgtgggcccatctgcatatagggcaacaacagcaagagtcatcgcaacatctggcattttgttcatgttaacatcgatggcacgcaaatgttttcttccagatgagtccctgggcggtccagttacagtgacactggtctctgtccatgtaac

SEQ ID NO: 2941 - DNA, 200 bp, Kochia scoparia
cctttctgatacattacacttttcttgtgctatatattgtttcaaatttgataattcgatcatgcttcaaattttgcacacagccgtaatccatggttataaaatgactatgacacttgtcttgttactgaaaagtgcatacagtaacaaagctgatgttacttcttagtttactctaataatggttggacggtcactgg

SEQ ID NO: 2942 - DNA, 200 bp, Kochia scoparia
ccagtgaccgtccaaccattattagagtaaactaagaagtaacatcagctttgttactgtatgcacttttcagtaacaagacaagtgtcatagtcattttataaccatggattacggctgtgtgcaaaatttgaagcatgatcgaattatcaaatttgaaacaatatatagcacaagaaaagtgtaatgtatcagaaagg

SEQ ID NO: 2943 - DNA, 200 bp, Kochia scoparia
ctaataatggttggacggtcactggcgcacatccccatggttggaagttgtgaatattgttgtcataatggcttatggagcatcttttggtacacttcaggagtaaaagaccactagtccagtatagggttaatcacctctagaactagttagtcacatatactcggaaaattattcatattttgtggttacatgcgttc

SEQ ID NO: 2944 - DNA, 200 bp, Kochia scoparia
gaacgcatgtaaccacaaaatatgaataattttccgagtatatgtgactaactagttctagaggtgattaaccctatactggactagtggtcttttactcctgaagtgtaccaaaagatgctccataagccattatgacaacaatattcacaacttccaaccatggggatgtgcgccagtgaccgtccaaccattattag

SEQ ID NO: 2945 - DNA, 200 bp, Kochia scoparia
tcatattttgtggttacatgcgttcgtttatctgcatcttgcctagtgtctcctcttgaaatcattcatatatgttcttttttttccccttcatctgttacatgttcaaaatatgcttacaacgaaattgggtaacttgaccagttgctagctggagagtgaaggaaacagaaaggatgattgccatctgtacagaactc

SEQ ID NO: 2946 - DNA, 200 bp, Kochia scoparia
gagttctgtacagatggcaatcatcctttctgtttccttcactctccagctagcaactggtcaagttacccaatttcgttgtaagcatattttgaacatgtaacagatgaaggggaaaaaaaagaacatatatgaatgatttcaagaggagacactaggcaagatgcagataaacgaacgcatgtaaccacaaaatatga

SEQ ID NO: 2947 - DNA, 200 bp, Kochia scoparia
gatgattgccatctgtacagaactcagaaaggttagccacattctttaatcttgtagtaaaaaataaagttgcctgtttcatgtaagttgatgttaattcggacttttaaaattttcagcttggagcaacagttgaggaaggacctgattactgtgtgatcactccaccagaaaaactaaacgtaaccgccatcgacaca

SEQ ID NO: 2948 - DNA, 200 bp, Kochia scoparia
tgtgtcgatggcggttacgtttagtttttctggtggagtgatcacacagtaatcaggtccttcctcaactgttgctccaagctgaaaattttaaaagtccgaattaacatcaacttacatgaaacaggcaactttattttttactacaagattaaagaatgtggctaacctttctgagttctgtacagatggcaatcatc

SEQ ID NO: 2949 - DNA, 200 bp, Kochia scoparia
actaaacgtaaccgccatcgacacatatgatgatcatcgaatggccatggcattctctcttgctgcctgtgctgatgttcctgtcactattaaggacccaggctgcacccgcaagaccttcccagactactttgacgtcttggaacggtttgccaagcattgagcggctatctgcagatttttcataaagtatgcacgaa

SEQ ID NO: 2950 - DNA, 200 bp, Kochia scoparia
ttcgtgcatactttatgaaaaatctgcagatagccgctcaatgcttggcaaaccgttccaagacgtcaaagtagtctgggaaggtcttgcgggtgcagcctgggtccttaatagtgacaggaacatcagcacaggcagcaagagagaatgccatggccattcgatgatcatcatatgtgtcgatggcggttacgtttagt

SEQ ID NO: 2951 - DNA, 200 bp, Kochia scoparia
agatttttcataaagtatgcacgaaagtttcaatttaagaagataccgagttgattatatgctttccgcataagttattgtcacattttttgtattatgtttgtaagatcttaggcaataagatatactgttagaaattatgtgtatctgattatttagagatgtatacttgggtcagttgaaattgtacgagaaaggtc

SEQ ID NO: 2952 - DNA, 200 bp, Kochia scoparia
gacctttctcgtacaatttcaactgacccaagtatacatctctaaataatcagatacacataatttctaacagtatatcttattgcctaagatcttacaaacataatacaaaaaatgtgacaataacttatgcggaaagcatataatcaactcggtatcttcttaaattgaaactttcgtgcatactttatgaaaaatct

SEQ ID NO: 2953 - DNA, 200 bp, Kochia scoparia
cagttgaaattgtacgagaaaggtctggatttcgaaaaaaatgtgatccagacattagtgtggtctgaactgaagcaagtactccctccgtctcataattctcacaactcttgctattatttgtgagaaataaaatattcaagtgttgcgagaattgtgtgacagcgggagtagcaacttttcaagtttggaattaattt

SEQ ID NO: 2954 - DNA, 200 bp, Kochia scoparia
aaattaattccaaacttgaaaagttgctactcccgctgtcacacaattctcgcaacacttgaatattttatttctcacaaataatagcaagagttgtgagaattatgagacggagggagtacttgcttcagttcagaccacactaatgtctggatcacatttttttcgaaatccagacctttctcgtacaatttcaactg

SEQ ID NO: 2955 - DNA, 200 bp, Kochia scoparia
aacttttcaagtttggaattaattttgtgatgtgagttttttgtgtattctttgttttccatcaaaccctcctccaaagtacaaacccaattcatggtatggttgatgcaacagcaatatgtcaaaatcagtgtttgtgatgttggcttctctacttcattatctcttcttgttcagtatgatttcgcaatctcttcccg

SEQ ID NO: 2956 - DNA, 200 bp, Kochia scoparia
cgggaagagattgcgaaatcatactgaacaagaagagataatgaagtagagaagccaacatcacaaacactgattttgacatattgctgttgcatcaaccataccatgaattgggtttgtactttggaggagggtttgatggaaaacaaagaatacacaaaaaactcacatcacaaaattaattccaaacttgaaaagtt

SEQ ID NO: 2957 - DNA, 200 bp, Kochia scoparia
agtatgatttcgcaatctcttcccgtcaaaatcccttctctgataaacgcggaaatcgtgtcttcccctcagtgtgtatccacctcttaaaaatttgttgagagttgaaatgtgctgccactggattcatcctttagggcgaattttgaacggattttaggtggttaggattcaatccctgtcaattattgttacgggaa

SEQ ID NO: 2958 - DNA, 200 bp, Kochia scoparia
ttcccgtaacaataattgacagggattgaatcctaaccacctaaaatccgttcaaaattcgccctaaaggatgaatccagtggcagcacatttcaactctcaacaaatttttaagaggtggatacacactgaggggaagacacgatttccgcgtttatcagagaagggattttgacgggaagagattgcgaaatcatact

SEQ ID NO: 2959 - DNA, 200 bp, Kochia scoparia
tccctgtcaattattgttacgggaattagacacgcgttctgccttaccaaccccattttttttgtcactatatcaagtatccattgctagttgtagtcatgtagtagggtctgaaatctaaagctaagtagcaagattgcaacaacaggaacagcaaataaatctagacttttgaggtttgttttttttttttttttttt

SEQ ID NO: 2960 - DNA, 200 bp, Kochia scoparia
aaaaaaaaaaaaaaaaaaacaaacctcaaaagtctagatttatttgctgttcctgttgttgcaatcttgctacttagctttagatttcagaccctactacatgactacaactagcaatggatacttgatatagtgacaaaaaaaatggggttggtaaggcagaacgcgtgtctaattcccgtaacaataattgacaggga

SEQ ID NO: 2961 - DNA, 200 bp, Kochia scoparia
ggtttgttttttttttttttttttttgacttttgagcttagtttgtcatattggttaaataataagttactgtaaatagattcagttttaattttgttgttagtgttagtgtgtttggcggtggttggtggtttatctatcttttccattactagtgtcataattcagagaagatctactttgttgatgataatctgtgt

SEQ ID NO: 2962 - DNA, 200 bp, Kochia scoparia
acacagattatcatcaacaaagtagatcttctctgaattatgacactagtaatggaaaagatagataaaccaccaaccaccgccaaacacactaacactaacaacaaaattaaaactgaatctatttacagtaacttattatttaaccaatatgacaaactaagctcaaaagtcaaaaaaaaaaaaaaaaaaaacaaacc

SEQ ID NO: 2963 - DNA, 200 bp, Kochia scoparia
ctactttgttgatgataatctgtgtagtattgaatcagacatcaaatcaattcgtagaatttgttgaatctagtattagcaaggtccccttgtagacggctgcagatgacagcgattcatgagacgagagtattttttaatgtcagattttacaagcgattatagtgatgttgaattagaattattattaggttcaattt

SEQ ID NO: 2964 - DNA, 200 bp, Kochia scoparia
aaattgaacctaataataattctaattcaacatcactataatcgcttgtaaaatctgacattaaaaaatactctcgtctcatgaatcgctgtcatctgcagccgtctacaaggggaccttgctaatactagattcaacaaattctacgaattgatttgatgtctgattcaatactacacagattatcatcaacaaagtag

SEQ ID NO: 2965 - DNA, 200 bp, Kochia scoparia
ttagaattattattaggttcaattttcattatctttgttattttttttatctctgttgtaaatgtcgtatgacttgttattttttatctctgtcgtaaatagttacttttcccctagaaaaaagtcagaactgacatacgactaccacttcagttcgtaatttataattataattattattattctcccttgttttactt

SEQ ID NO: 2966 - DNA, 200 bp, Kochia scoparia
aagtaaaacaagggagaataataataattataattataaattacgaactgaagtggtagtcgtatgtcagttctgacttttttctaggggaaaagtaactatttacgacagagataaaaaataacaagtcatacgacatttacaacagagataaaaaaaataacaaagataatgaaaattgaacctaataataattctaa

SEQ ID NO: 2967 - DNA, 200 bp, Kochia scoparia
attattattctcccttgttttactttagacaaaaacagtaattgcaaataataatttatcatgaatcatgatgaaaaattgaaaatggaatagaagaagtgaagaactgccttagtttaaaaaaaaacgaagattagatagaattacactgaaggtaagaatatagtgagagtctaattagtggttaattaactatctag

SEQ ID NO: 2968 - DNA, 200 bp, Kochia scoparia
ctagatagttaattaaccactaattagactctcactatattcttaccttcagtgtaattctatctaatcttcgtttttttttaaactaaggcagttcttcacttcttctattccattttcaatttttcatcatgattcatgataaattattatttgcaattactgtttttgtctaaagtaaaacaagggagaataataat

SEQ ID NO: 2969 - DNA, 200 bp, Kochia scoparia
aattagtggttaattaactatctaggcttaattctcaatcacttttttaaaaacttgtgctatcacttttgcccttcaattagggttcattagtggggttaaataatgcacaatagggtttgcattatatgacaacattagagtgagggataactcaagtggttaaaactcttctctcgatttcagaatattctgagatc

SEQ ID NO: 2970 - DNA, 200 bp, Kochia scoparia
gatctcagaatattctgaaatcgagagaagagttttaaccacttgagttatccctcactctaatgttgtcatataatgcaaaccctattgtgcattatttaaccccactaatgaaccctaattgaagggcaaaagtgatagcacaagtttttaaaaaagtgattgagaattaagcctagatagttaattaaccactaatt

SEQ ID NO: 2971 - DNA, 200 bp, Kochia scoparia
ctcgatttcagaatattctgagatcgattctcatttccattctagtggctctcttaacaccaaaaaaaaataaaaaataaaaaattagtggggttaaataatgcacaatagggtttgcattatatgacaacattaacttgttaactaaacgaacacatacatgtgtaaataaaacgataagaaagttgttctatacttat

SEQ ID NO: 2972 - DNA, 200 bp, Kochia scoparia
ataagtatagaacaactttcttatcgttttatttacacatgtatgtgttcgtttagttaacaagttaatgttgtcatataatgcaaaccctattgtgcattatttaaccccactaattttttattttttatttttttttggtgttaagagagccactagaatggaaatgagaatcgatctcagaatattctgaaatcgag

SEQ ID NO: 2973 - DNA, 200 bp, Kochia scoparia
gataagaaagttgttctatacttattcaaaggtctcgagttcgagccctgagaatgaagaagcatgtgttaaaagaactaatttcacaattgtgacttaactcgattcgaatccaaattaatcaaatcctaacggatttcgaatattgaatacgcttgtgtaaaacataacatttatgaacttgttaagtagtttaatgg

SEQ ID NO: 2974 - DNA, 200 bp, Kochia scoparia
ccattaaactacttaacaagttcataaatgttatgttttacacaagcgtattcaatattcgaaatccgttaggatttgattaatttggattcgaatcgagttaagtcacaattgtgaaattagttcttttaacacatgcttcttcattctcagggctcgaactcgagacctttgaataagtatagaacaactttcttatc

SEQ ID NO: 2975 - DNA, 200 bp, Kochia scoparia
atgaacttgttaagtagtttaatggagtagttaataatcctttataacataggtattattaaagtgataaagtaaacaagattgtaagacgacaataagaccaatcaaagttggggtcaaatgattgaataaaatgaaataatttttttaaaaaaaatagagaaaagattatgtgataatataattacaaattattacat

SEQ ID NO: 2976 - DNA, 200 bp, Kochia scoparia
atgtaataatttgtaattatattatcacataatcttttctctattttttttaaaaaaattatttcattttattcaatcatttgaccccaactttgattggtcttattgtcgtcttacaatcttgtttactttatcactttaataatacctatgttataaaggattattaactactccattaaactacttaacaagttcat

SEQ ID NO: 2977 - DNA, 200 bp, Kochia scoparia
ataatataattacaaattattacattatcaccgccaaaacttattgtagcatgtgagaatgtgattattaaattaaaaaaaggcaaagttggaagttaaacatgtcatctttcttcctttgtagtctgccctaagcttaaccatgttgtctcccctttttaaaaaaataaattaaaagttgcattattgattattaagtt

SEQ ID NO: 2978 - DNA, 200 bp, Kochia scoparia
aacttaataatcaataatgcaacttttaatttatttttttaaaaaggggagacaacatggttaagcttagggcagactacaaaggaagaaagatgacatgtttaacttccaactttgcctttttttaatttaataatcacattctcacatgctacaataagttttggcggtgataatgtaataatttgtaattatattat

SEQ ID NO: 2979 - DNA, 200 bp, Kochia scoparia
aagttgcattattgattattaagtttacaaattatatcctatgataaattgctaattgaaccatacctaataagcctaagctattagatctatcacttatatatatagttgcacacattcgtaccccttaggtccttactaaatcaatttcgatctcggtcatttaatattgctaacaactatctgtataagaatctatt

SEQ ID NO: 2980 - DNA, 200 bp, Kochia scoparia
aatagattcttatacagatagttgttagcaatattaaatgaccgagatcgaaattgatttagtaaggacctaaggggtacgaatgtgtgcaactatatatataagtgatagatctaatagcttaggcttattaggtatggttcaattagcaatttatcataggatataatttgtaaacttaataatcaataatgcaactt

SEQ ID NO: 2981 - DNA, 200 bp, Kochia scoparia
acaactatctgtataagaatctattaaaatgtataagctcgatatttttcaaatgaaaacaaatacttcgtaattcatttttgttcggttatctttaattgtccacaaggtggataataattagcttggtagtgcaataataaacaagaataatactagctagtgcaataataatacaaatgtgaagattatcaataata

SEQ ID NO: 2982 - DNA, 200 bp, Kochia scoparia
tattattgataatcttcacatttgtattattattgcactagctagtattattcttgtttattattgcactaccaagctaattattatccaccttgtggacaattaaagataaccgaacaaaaatgaattacgaagtatttgttttcatttgaaaaatatcgagcttatacattttaatagattcttatacagatagttgt

SEQ ID NO: 2983 - DNA, 200 bp, Kochia scoparia
acaaatgtgaagattatcaataataaacacaattaattgtaattaactcaagattaggtgaattttatgatgaggagtgtagagtaaagaatgtggggacataacataagattattaaagtagattatcctataaccttttctccacatctctacttatctcttagtattaaattagaaagacttgaagcttaagaatca

SEQ ID NO: 2984 - DNA, 200 bp, Kochia scoparia
tgattcttaagcttcaagtctttctaatttaatactaagagataagtagagatgtggagaaaaggttataggataatctactttaataatcttatgttatgtccccacattctttactctacactcctcatcataaaattcacctaatcttgagttaattacaattaattgtgtttattattgataatcttcacatttgt

SEQ ID NO: 2985 - DNA, 200 bp, Kochia scoparia
agaaagacttgaagcttaagaatcaaggtaatatacatggtatatctagcttgtttgttgaagcaattttgtagggcacttcaactttattttttttattttttttaattaaatagtgacaatatatttaattttgatcatttttatttatcttgtatgctagtaaattaaagaattaaaccttggtgtcaggaataaat

SEQ ID NO: 2986 - DNA, 200 bp, Kochia scoparia
atttattcctgacaccaaggtttaattctttaatttactagcatacaagataaataaaaatgatcaaaattaaatatattgtcactatttaattaaaaaaaataaaaaaaataaagttgaagtgccctacaaaattgcttcaacaaacaagctagatataccatgtatattaccttgattcttaagcttcaagtctttct

SEQ ID NO: 2987 - DNA, 200 bp, Kochia scoparia
ttaaaccttggtgtcaggaataaataaataaataatactgactttcgattaacggaataatagagaaagttacataggagatcgaattcaattcacttgtttaaatcttacctatagtttataccatgtatgtttttactacttcataaataaaatttaggacatgtttggcaattgatttaatactaacgatttttttt

SEQ ID NO: 2988 - DNA, 200 bp, Kochia scoparia
aaaaaaaatcgttagtattaaatcaattgccaaacatgtcctaaattttatttatgaagtagtaaaaacatacatggtataaactataggtaagatttaaacaagtgaattgaattcgatctcctatgtaactttctctattattccgttaatcgaaagtcagtattatttatttatttattcctgacaccaaggtttaa

SEQ ID NO: 2989 - DNA, 200 bp, Kochia scoparia
tgatttaatactaacgatttttttttattttttttatgacatttcgtcatcaatttgaaaaggtgaatatccattatcctaggcaacacactttcgaacagtctacaaataaacgcaaataaatcaaaccagcgaattgcgattgagtgcatatgtatgagatgatgatcaatcatcgcatattactccgaataaagcat

SEQ ID NO: 2990 - DNA, 200 bp, Kochia scoparia
atgctttattcggagtaatatgcgatgattgatcatcatctcatacatatgcactcaatcgcaattcgctggtttgatttatttgcgtttatttgtagactgttcgaaagtgtgttgcctaggataatggatattcaccttttcaaattgatgacgaaatgtcataaaaaaaataaaaaaaaatcgttagtattaaatca

SEQ ID NO: 2991 - DNA, 200 bp, Kochia scoparia
tcgcatattactccgaataaagcattgattgatttggaatgaaagatatccaaagaatattgaaggaaagatgctaaattgctatgaatatatatacaatgaagattagcttgtttattatagtattcaggattagcttgtttattatagtattcaggattggaacctaaccacccaaaacggattctcgaatccggatt

SEQ ID NO: 2992 - DNA, 200 bp, Kochia scoparia
aatccggattcgagaatccgttttgggtggttaggttccaatcctgaatactataataaacaagctaatcctgaatactataataaacaagctaatcttcattgtatatatattcatagcaatttagcatctttccttcaatattctttggatatctttcattccaaatcaatcaatgctttattcggagtaatatgcga

SEQ ID NO: 2993 - DNA, 200 bp, Kochia scoparia
caaaacggattctcgaatccggattagttcaataggttgaattggatgatacaccaaaaaaaaattataatattcaagagtttgaattagcatgtgcaagtagcgcgatgacacatagtccaaaaataaaaggatctggtccaaaatttactatataacttattacataattaaagataaaatttgtaacatacatatac

SEQ ID NO: 2994 - DNA, 200 bp, Kochia scoparia
gtatatgtatgttacaaattttatctttaattatgtaataagttatatagtaaattttggaccagatccttttatttttggactatgtgtcatcgcgctacttgcacatgctaattcaaactcttgaatattataatttttttttggtgtatcatccaattcaacctattgaactaatccggattcgagaatccgttttg

SEQ ID NO: 2995 - DNA, 200 bp, Kochia scoparia
gataaaatttgtaacatacatatacgggacatatttaaaaattacaccaatctttaaaatccttgtaatatcgtagccacgacattgtttgtattgtagtagcacgtacacctgcccaacataacatcgctattctattgaattgaacacaaaaatgaaaaaaaggacttatttcacattctcacagcattcacataatc

SEQ ID NO: 2996 - DNA, 200 bp, Kochia scoparia
gattatgtgaatgctgtgagaatgtgaaataagtcctttttttcatttttgtgttcaattcaatagaatagcgatgttatgttgggcaggtgtacgtgctactacaatacaaacaatgtcgtggctacgatattacaaggattttaaagattggtgtaatttttaaatatgtcccgtatatgtatgttacaaattttatc

SEQ ID NO: 2997 - DNA, 200 bp, Kochia scoparia
acattctcacagcattcacataatcacatgtctttgtctcccgttctattgaatttaactccactcctatattaattatttcccatacaataatacaaacaaacaacttacacataaaaatgaataataaaagacagtgagagatcagggctgcctagtcaatccagtggattaacaaaaattgtcaatctaatggcatt

SEQ ID NO: 2998 - DNA, 200 bp, Kochia scoparia
aatgccattagattgacaatttttgttaatccactggattgactaggcagccctgatctctcactgtcttttattattcatttttatgtgtaagttgtttgtttgtattattgtatgggaaataattaatataggagtggagttaaattcaatagaacgggagacaaagacatgtgattatgtgaatgctgtgagaatgt

SEQ ID NO: 2999 - DNA, 200 bp, Lolium multiflorum
acctgaatgggcacttagtattcatgtacctacattcaagacatacaacatgcaaattttgttatcgcaaaaggttttcacgatctgtaagacactacatctaggatcctcctgggcttattcagtttcgacccgttcgaatgttatagtgcagcatgccctgttaacctttgtacatcaagataagaaactgaaacctg

SEQ ID NO: 3000 - DNA, 200 bp, Lolium multiflorum
caggtttcagtttcttatcttgatgtacaaaggttaacagggcatgctgcactataacattcgaacgggtcgaaactgaataagcccaggaggatcctagatgtagtgtcttacagatcgtgaaaaccttttgcgataacaaaatttgcatgttgtatgtcttgaatgtaggtacatgaatactaagtgcccattcaggt

SEQ ID NO: 3001 - DNA, 200 bp, Lolium multiflorum
catcaagataagaaactgaaacctgtttacttcgctgtcgtctcttgctgatccttactttctctcatcagggaacaacggttgtggataacctgttgaacagcgaggatgtccactacatgctcgaggccctggacgcgctcgggctctccgtggaagcagacaaagttgcaaaaagagctgtagtcgttggctgcggc

SEQ ID NO: 3002 - DNA, 200 bp, Lolium multiflorum
gccgcagccaacgactacagctctttttgcaactttgtctgcttccacggagagcccgagcgcgtccagggcctcgagcatgtagtggacatcctcgctgttcaacaggttatccacaaccgttgttccctgatgagagaaagtaaggatcagcaagagacgacagcgaagtaaacaggtttcagtttcttatcttgatg

SEQ ID NO: 3003 - DNA, 200 bp, Lolium multiflorum
aagagctgtagtcgttggctgcggcggcaggttcccgattgaaaaggatgccaaggaggaagtaaagctcttcttgggcaacgctggaactgcaatgcggccattgacggcagctgtagtagctgctggtggaaatgcgacgtatgtttcttttttttatccttacgggaataagtatgagttccgtggttatgctttga

SEQ ID NO: 3004 - DNA, 200 bp, Lolium multiflorum
tcaaagcataaccacggaactcatacttattcccgtaaggataaaaaaaagaaacatacgtcgcatttccaccagcagctactacagctgccgtcaatggccgcattgcagttccagcgttgcccaagaagagctttacttcctccttggcatccttttcaatcgggaacctgccgccgcagccaacgactacagctctt

SEQ ID NO: 3005 - DNA, 200 bp, Lolium multiflorum
tatgagttccgtggttatgctttgagactgatggtttacgtctctcttctgaacttcagttatgttcttgatggagtaccaagaatgatggagcgtcctatcggtgacttaggtgtcggtttgaaacaactaggtgcgagtgttgattgtttcctcggcactgactgcccacctgttcgtatcaacggcattggagggct

SEQ ID NO: 3006 - DNA, 200 bp, Lolium multiflorum
agccctccaatgccgttgatacgaacaggtgggcagtcagtgccgaggaaacaatcaacactcgcacctagttgtttcaaaccgacacctaagtcaccgataggacgctccatcattcttggtactccatcaagaacataactgaagttcagaagagagacgtaaaccatcagtctcaaagcataaccacggaactcata

SEQ ID NO: 3007 - DNA, 200 bp, Lolium multiflorum
ttcgtatcaacggcattggagggctacctggtggcaaggttagcttcatgaacttccatgttatacgcttttgtacaaacatttcacttgtctggagaaaaaacaagattactgagagtagtatggtgcaatgcgaccacacaataaatttgaaatagccataaccaataggccctattttgtgtaaacagatatgctga

SEQ ID NO: 3008 - DNA, 200 bp, Lolium multiflorum
tcagcatatctgtttacacaaaatagggcctattggttatggctatttcaaatttattgtgtggtcgcattgcaccatactactctcagtaatcttgttttttctccagacaagtgaaatgtttgtacaaaagcgtataacatggaagttcatgaagctaaccttgccaccaggtagccctccaatgccgttgatacgaa

SEQ ID NO: 3009 - DNA, 200 bp, Lolium multiflorum
tattttgtgtaaacagatatgctgattgtgttgtggtcttagatcacacggtctatcataaattagcacttaacattgaaccacattccacaggttaagctgtctggttccatcagcagccaatacttgagttccttactgatggctgctcctttggctcttggggatgttgagattgaaattattgataaactaatctc

SEQ ID NO: 3010 - DNA, 200 bp, Lolium multiflorum
gagattagtttatcaataatttcaatctcaacatccccaagagccaaaggagcagccatcagtaaggaactcaagtattggctgctgatggaaccagacagcttaacctgtggaatgtggttcaatgttaagtgctaatttatgatagaccgtgtgatctaagaccacaacacaatcagcatatctgtttacacaaaata

SEQ ID NO: 3011 - DNA, 200 bp, Lolium multiflorum
ttgaaattattgataaactaatctctgttccttacgttgaaatgacattgagattgatggagcgttttggtgtgacggcagagcattctgatagctgggatagattctacattaaaggaggacagaagtacaagtaagttttgaattgttctgcttattctaaacatttgtcacatttgacttctggataaattagagaa

SEQ ID NO: 3012 - DNA, 200 bp, Lolium multiflorum
ttctctaatttatccagaagtcaaatgtgacaaatgtttagaataagcagaacaattcaaaacttacttgtacttctgtcctcctttaatgtagaatctatcccagctatcagaatgctctgccgtcacaccaaaacgctccatcaatctcaatgtcatttcaacgtaaggaacagagattagtttatcaataatttcaa

SEQ ID NO: 3013 - DNA, 200 bp, Lolium multiflorum
agtctacaccaacccactttctctttgcccaccaaaactttggtttggtaagaactaagccctcttctttcccttctctctcttaaaagcctaaaatccacctaactttttcagccaacaaacaacgccaaattcagaggaagaataatggctcaagctactaccatcaacaatggtgtccatactggtcaattgcacca

SEQ ID NO: 3014 - DNA, 200 bp, Lolium multiflorum
tggtgcaattgaccagtatggacaccattgttgatggtagtagcttgagccattattcttcctctgaatttggcgttgtttgttggctgaaaaagttaggtggattttaggcttttaagagagagaagggaaagaagagggcttagttcttaccaaaccaaagttttggtgggcaaagagaaagtgggttggtgtagact

SEQ ID NO: 3015 - DNA, 200 bp, Lolium multiflorum
gtgtccatactggtcaattgcaccatactttacccaaaacccagttacccaaatcttcaaaaactcttaattttggatcaaacttgagaatttctccaaagttcatgtctttaaccaataaaagagttggtgggcaatcatcaattgttcccaagattcaagcttctgttgctgctgcagctgagaaaccttcatctgtc

SEQ ID NO: 3016 - DNA, 200 bp, Lolium multiflorum
gacagatgaaggtttctcagctgcagcagcaacagaagcttgaatcttgggaacaattgatgattgcccaccaactcttttattggttaaagacatgaactttggagaaattctcaagtttgatccaaaattaagagtttttgaagatttgggtaactgggttttgggtaaagtatggtgcaattgaccagtatggacac

SEQ ID NO: 3017 - DNA, 200 bp, Lolium multiflorum
tgcagctgagaaaccttcatctgtcccagaaattgtgttacaacccatcaaagagatctctggtactgttcaattgcctgggtcaaagtctttatccaatcgaatccttcttttagctgctttgtctgaggtatttatttctcaactgcgaaaacaatctctatttgatattggaatttatattacatactccatcttgt

SEQ ID NO: 3018 - DNA, 200 bp, Lolium multiflorum
acaagatggagtatgtaatataaattccaatatcaaatagagattgttttcgcagttgagaaataaatacctcagacaaagcagctaaaagaaggattcgattggataaagactttgacccaggcaattgaacagtaccagagatctctttgatgggttgtaacacaatttctgggacagatgaaggtttctcagctgca

SEQ ID NO: 3019 - DNA, 200 bp, Lolium multiflorum
caagatatacaacatgcaaattttgccatcgcaaaaggttttcacgagctataaggtactactaaatctaggatcctcctgggcttattcagtttagatccgttggaatattatagtgcagcatgccctgctaacctttgtacagtaagataagaaattgaaactggtttatttcgctgtcgtctcttgttgatcattaa

SEQ ID NO: 3020 - DNA, 200 bp, Lolium multiflorum
ttaatgatcaacaagagacgacagcgaaataaaccagtttcaatttcttatcttactgtacaaaggttagcagggcatgctgcactataatattccaacggatctaaactgaataagcccaggaggatcctagatttagtagtaccttatagctcgtgaaaaccttttgcgatggcaaaatttgcatgttgtatatcttg

SEQ ID NO: 3021 - DNA, 200 bp, Lolium multiflorum
gctgtcgtctcttgttgatcattaactggcttttgctcatcagggaacaacggttgtggataacctgttgaacagcgaggatgtccactacatgctcgaggccctggacgcgcttgggctctcagtggaagcagacaaagttgcaaaaagagctgtagtcgtcggctgcggcggcaggttcccgattgaaaaggatgcca

SEQ ID NO: 3022 - DNA, 200 bp, Lolium multiflorum
tggcatccttttcaatcgggaacctgccgccgcagccgacgactacagctctttttgcaactttgtctgcttccactgagagcccaagcgcgtccagggcctcgagcatgtagtggacatcctcgctgttcaacaggttatccacaaccgttgttccctgatgagcaaaagccagttaatgatcaacaagagacgacagc

SEQ ID NO: 3023 - DNA, 200 bp, Lolium multiflorum
cagctgcccggctccaagtcgctctccaaccggatcctcctcctctccgccttgtccgagggaacaacggtcgtggataacctgttgaacagcgaggatgtccactacatgctcgaggccctggacgcgctcgggctctccgtggaagcagacaaagttgcaaaaagagctgtagtcgttggctgtggcggcaggttccc

SEQ ID NO: 3024 - DNA, 200 bp, Lolium multiflorum
gggaacctgccgccacagccaacgactacagctctttttgcaactttgtctgcttccacggagagcccgagcgcgtccagggcctcgagcatgtagtggacatcctcgctgttcaacaggttatccacgaccgttgttccctcggacaaggcggagaggaggaggatccggttggagagcgacttggagccgggcagctg

SEQ ID NO: 3025 - DNA, 200 bp, Lolium multiflorum
tcgttggctgtggcggcaggttcccgattgagaaggatgccaaggaggaagtaaagctcttcttgggcaacgctggaactgcaatgcggccattgacggcagctgtagtagctgctggtggaaatgcaacttatgttcttgatggagtaccaagaatgagggagcgacctatcggtgacttagttgtcggtttgaaacaa

SEQ ID NO: 3026 - DNA, 200 bp, Lolium multiflorum
ttgtttcaaaccgacaactaagtcaccgataggtcgctccctcattcttggtactccatcaagaacataagttgcatttccaccagcagctactacagctgccgtcaatggccgcattgcagttccagcgttgcccaagaagagctttacttcctccttggcatccttctcaatcgggaacctgccgccacagccaacga

SEQ ID NO: 3027 - DNA, 200 bp, Lolium multiflorum
tgacttagttgtcggtttgaaacaactaggtgcgaatgttgattgtttcctcggcactgactgcccacctgttcggatcaacggcattggagggctacctggtggcaaggttaagctgtctggttccatcagcagccaatacttgagttccttgctgatggctgctcctttggctcttggggatgtcgagattgaaatca

SEQ ID NO: 3028 - DNA, 200 bp, Lolium multiflorum
tgatttcaatctcgacatccccaagagccaaaggagcagccatcagcaaggaactcaagtattggctgctgatggaaccagacagcttaaccttgccaccaggtagccctccaatgccgttgatccgaacaggtgggcagtcagtgccgaggaaacaatcaacattcgcacctagttgtttcaaaccgacaactaagtca

SEQ ID NO: 3029 - DNA, 200 bp, Lolium multiflorum
cttggggatgtcgagattgaaatcattgataaactgatctctgttccttacgttgaaatgacattgagattgatggagcgttttggcgtgacagcagagcattctgatagctgggacagattctacattaaaggaggacagaagtacaagtcccctggaaatgcctatgtcgaaggtgatgcctcaagtgcgagctattt

SEQ ID NO: 3030 - DNA, 200 bp, Lolium multiflorum
aaatagctcgcacttgaggcatcaccttcgacataggcatttccaggggacttgtacttctgtcctcctttaatgtagaatctgtcccagctatcagaatgctctgctgtcacgccaaaacgctccatcaatctcaatgtcatttcaacgtaaggaacagagatcagtttatcaatgatttcaatctcgacatccccaag

SEQ ID NO: 3031 - DNA, 200 bp, Lolium multiflorum
gtgatgcctcaagtgcgagctatttcttggctggtgctgcaatcactggaggaactgtgactgtccaaggttgcggcaccaccagtttgcagggtgatgtgaaatttgctgaggtactagaaatgatgggagcgaaggttacatggaccgacactagtgtaactgttactggtccaccgcgtcagccctttggaaggaaa

SEQ ID NO: 3032 - DNA, 200 bp, Lolium multiflorum
tttccttccaaagggctgacgcggtggaccagtaacagttacactagtgtcggtccatgtaaccttcgctcccatcatttctagtacctcagcaaatttcacatcaccctgcaaactggtggtgccgcaaccttggacagtcacagttcctccagtgattgcagcaccagccaagaaatagctcgcacttgaggcatcac

SEQ ID NO: 3033 - DNA, 200 bp, Lolium multiflorum
accgcgtcagccctttggaaggaaacacctaaaagctgttgatgtcaacatgaacaaaatgcctgatgttgccatgactcttgccgttgttgccctttttgctgatggtccaactgctatcagagatgttgcctcctggagagtgaaggaaaccgagagaatggtggcaatccggacggaactaacaaagctgggagcaa

SEQ ID NO: 3034 - DNA, 200 bp, Lolium multiflorum
ttgctcccagctttgttagttccgtccggattgccaccattctctcggtttccttcactctccaggaggcaacatctctgatagcagttggaccatcagcaaaaagggcaacaacggcaagagtcatggcaacatcaggcattttgttcatgttgacatcaacagcttttaggtgtttccttccaaagggctgacgcggt

SEQ ID NO: 3035 - DNA, 200 bp, Lolium multiflorum
acggaactaacaaagctgggagcaacggtagaggaaggcccggactactgcattatcacaccaccagagaagctgaacgtcacggcgatcgacacctacgatgaccaccggatggcgatggccttctccctcgctgcctgtgcagaggtgcctgtcacgatcagggaccctgggtgcacccgcaagaccttccccaatta

SEQ ID NO: 3036 - DNA, 200 bp, Lolium multiflorum
taattggggaaggtcttgcgggtgcacccagggtccctgatcgtgacaggcacctctgcacaggcagcgagggagaaggccatcgccatccggtggtcatcgtaggtgtcgatcgccgtgacgttcagcttctctggtggtgtgataatgcagtagtccgggccttcctctaccgttgctcccagctttgttagttccgt

SEQ ID NO: 3037 - DNA, 200 bp, Lolium multiflorum
cattgaaagttctattattattttgagtttgcatcttatgttgtttttcctttgtgattttatccattttcttaactagttattcgtttcctgaagtttttagtgtcataactcctaatcacaatcatgctacagggcacaacagtggtcgacaacttgctgtatagtgatgatattctttatatgttggacgctctcag

SEQ ID NO: 3038 - DNA, 200 bp, Lolium multiflorum
ctgagagcgtccaacatataaagaatatcatcactatacagcaagttgtcgaccactgttgtgccctgtagcatgattgtgattaggagttatgacactaaaaacttcaggaaacgaataactagttaagaaaatggataaaatcacaaaggaaaaacaacataagatgcaaactcaaaataataatagaactttcaatg

SEQ ID NO: 3039 - DNA, 200 bp, Lolium multiflorum
ttctttatatgttggacgctctcagaactcttggtttaaaagtggaggatgatagtacagccaaaagggcagtcgtagagggttgtggtggtctgtttcctgttggtaaagatggaaaggaagagattcaacttttccttggtaatgcaggaacagcgatgcgcccattgacagctgcggttgccgttgctggaggaaat

SEQ ID NO: 3040 - DNA, 200 bp, Lolium multiflorum
atttcctccagcaacggcaaccgcagctgtcaatgggcgcatcgctgttcctgcattaccaaggaaaagttgaatctcttcctttccatctttaccaacaggaaacagaccaccacaaccctctacgactgcccttttggctgtactatcatcctccacttttaaaccaagagttctgagagcgtccaacatataaagaa

SEQ ID NO: 3041 - DNA, 200 bp, Lolium multiflorum
tgcggttgccgttgctggaggaaattcaaggtttgtccaattatattctttatgtgagtgttgttttttgtgttagtttcaatcatgaaggtactagtgcagaagccgtacccctgaaattttcttattttgtatatatcaattggtaattgatgtaagatatttttccgagaggaataaaaaacagggggatagagaat

SEQ ID NO: 3042 - DNA, 200 bp, Lolium multiflorum
attctctatccccctgttttttattcctctcggaaaaatatcttacatcaattaccaattgatatatacaaaataagaaaatttcaggggtacggcttctgcactagtaccttcatgattgaaactaacacaaaaaacaacactcacataaagaatataattggacaaaccttgaatttcctccagcaacggcaaccgca

SEQ ID NO: 3043 - DNA, 200 bp, Lolium multiflorum
aataaaaaacagggggatagagaatattaaagtattgttctatcacattaactttttatcaaaggtgtacattgtgtttgtgaagtttatagagctaaagggatggaagggaaggggattgaagaagaggagaaaagaagaagatcctcctttgaataccaaggtttgaacggaagggagaaggaggaaactctaaacaa

SEQ ID NO: 3044 - DNA, 200 bp, Lolium multiflorum
ttgtttagagtttcctccttctcccttccgttcaaaccttggtattcaaaggaggatcttcttcttttctcctcttcttcaatccccttcccttccatccctttagctctataaacttcacaaacacaatgtacacctttgataaaaagttaatgtgatagaacaatactttaatattctctatccccctgttttttatt

SEQ ID NO: 3045 - DNA, 200 bp, Lolium multiflorum
gggagaaggaggaaactctaaacaatatggagatgaactgatgaagtttttggatcagaaccgcttgagaatcagagttaagccatgtgaaagtctatgagcatgacttcacctggttaataattttaagctctcaacttctcatcctcttttctttgtcgaaaatgtcatgtcttcatgtgatacgtgcttacataatc

SEQ ID NO: 3046 - DNA, 200 bp, Lolium multiflorum
gattatgtaagcacgtatcacatgaagacatgacattttcgacaaagaaaagaggatgagaagttgagagcttaaaattattaaccaggtgaagtcatgctcatagactttcacatggcttaactctgattctcaagcggttctgatccaaaaacttcatcagttcatctccatattgtttagagtttcctccttctccc

SEQ ID NO: 3047 - DNA, 200 bp, Lolium multiflorum
ccacgtccgtggccgcgcccgcggcgccggccggcgcggaggaggtcgtgctgcagcccatccgggagatctccggcgccgtgcagctgcccggctccaagtcgctctccaaccggatccttctcctctccgccttgtccgaggtgagaaaacaagcagacaaagcccctctccctacttctcccctttgtgtgaattgg

SEQ ID NO: 3048 - DNA, 200 bp, Lolium multiflorum
ccaattcacacaaaggggagaagtagggagaggggctttgtctgcttgttttctcacctcggacaaggcggagaggagaaggatccggttggagagcgacttggagccgggcagctgcacggcgccggagatctcccggatgggctgcagcacgacctcctccgcgccggccggcgccgcgggcgcggccacggacgtgg

SEQ ID NO: 3049 - DNA, 200 bp, Lolium multiflorum
cctacttacaatgcactagctgcacagctatttttttggtgcataaactattgactgctcaaataactttattcatgtggataggaccaaacttttagtagctatgaactgtactaggaaatcagtgcctacgcaaaactccgctacttacaatgacattgcacggttatattttcttgtgcataaatttggtcacatca

SEQ ID NO: 3050 - DNA, 200 bp, Lolium multiflorum
tgatgtgaccaaatttatgcacaagaaaatataaccgtgcaatgtcattgtaagtagcggagttttgcgtaggcactgatttcctagtacagttcatagctactaaaagtttggtcctatccacatgaataaagttatttgagcagtcaatagtttatgcaccaaaaaaatagctgtgcagctagtgcattgtaagtagg

SEQ ID NO: 3051 - DNA, 200 bp, Lolium multiflorum
cttgtgcataaatttggtcacatcagaagtgccatccatctaaaaaaatcggcgaaaattgagaacataggcagcttaatgacatcggtggcaataagcattttttgcagacgattcttgctttgcttcttttagccctttttattgttatgccctgctgccaaatgtcgcatcaggatatctgctgccaaatgttgcat

SEQ ID NO: 3052 - DNA, 200 bp, Lolium multiflorum
atgcaacatttggcagcagatatcctgatgcgacatttggcagcagggcataacaataaaaagggctaaaagaagcaaagcaagaatcgtctgcaaaaaatgcttattgccaccgatgtcattaagctgcctatgttctcaattttcgccgatttttttagatggatggcacttctgatgtgaccaaatttatgcacaag

SEQ ID NO: 3053 - DNA, 200 bp, Lolium multiflorum
ggatatctgctgccaaatgttgcatccgcatatggatcctggttttactgagcatacttcactgatgtaatcgaaaactgtcagttcaaacttcataaaagttgtagtaatcgcttcctaacaagccctcccttgctctggaatttacaattgacaggtcccctggaaatgcctatgtagaaggtgatgcctcaagtgca

SEQ ID NO: 3054 - DNA, 200 bp, Lolium multiflorum
tgcacttgaggcatcaccttctacataggcatttccaggggacctgtcaattgtaaattccagagcaagggagggcttgttaggaagcgattactacaacttttatgaagtttgaactgacagttttcgattacatcagtgaagtatgctcagtaaaaccaggatccatatgcggatgcaacatttggcagcagatatcc

SEQ ID NO: 3055 - DNA, 200 bp, Lolium multiflorum
tgtagaaggtgatgcctcaagtgcaagctacttcttggctggcgctgcaatcactggaggaactgtgactgtccaaggttgcggcaccaccagtttgcaggtagaactgtactgtcaatttttaccatttggttaagcatacttgcagtataacataatcaaagatatactgctgtcaaccaaacatgctttaagtggac

SEQ ID NO: 3056 - DNA, 200 bp, Lolium multiflorum
gtccacttaaagcatgtttggttgacagcagtatatctttgattatgttatactgcaagtatgcttaaccaaatggtaaaaattgacagtacagttctacctgcaaactggtggtgccgcaaccttggacagtcacagttcctccagtgattgcagcgccagccaagaagtagcttgcacttgaggcatcaccttctaca

SEQ ID NO: 3057 - DNA, 200 bp, Lolium multiflorum
tcaaccaaacatgctttaagtggacactcatttatgaatctataatataactacagtacagtaagttggttttcttgggctatctacctgacgatgcttaatattgcagggtgatgtgaaatttgctgaggtactagaaatgatgggagccaaggttacatggaccgacactagtgtaactgttactggcccaacacgtc

SEQ ID NO: 3058 - DNA, 200 bp, Lolium multiflorum
gacgtgttgggccagtaacagttacactagtgtcggtccatgtaaccttggctcccatcatttctagtacctcagcaaatttcacatcaccctgcaatattaagcatcgtcaggtagatagcccaagaaaaccaacttactgtactgtagttatattatagattcataaatgagtgtccacttaaagcatgtttggttga

SEQ ID NO: 3059 - DNA, 200 bp, Lolium multiflorum
gtaactgttactggcccaacacgtcagccctttggaaggaaacacctaaaagctgttgatgtcaacatgaacaaaatgcctaatgttgctatgactcttgccgttgttgccctttttgcagatggtccaactgctatcagagatggtgaaccctcttatgtgtttctgttgatttcttttggatgacttccgctacagct

SEQ ID NO: 3060 - DNA, 200 bp, Lolium multiflorum
agctgtagcggaagtcatccaaaagaaatcaacagaaacacataagagggttcaccatctctgatagcagttggaccatctgcaaaaagggcaacaacggcaagagtcatagcaacattaggcattttgttcatgttgacatcaacagcttttaggtgtttccttccaaagggctgacgtgttgggccagtaacagttac

SEQ ID NO: 3061 - DNA, 200 bp, Lolium multiflorum
cttgtccattctcctctgcagttgcctcctggagagtgaaggaaaccgagagaatggtggcaatccgtacggaactaacaaaggtagcacacctgtctccacttcttattttcagctcactgttgcacccccccagtgcttagtctcacctgttgtgttcctcgtgctatagctaggagcaacggtagaggaaggcccgg

SEQ ID NO: 3062 - DNA, 200 bp, Lolium multiflorum
ccgggccttcctctaccgttgctcctagctatagcacgaggaacacaacaggtgagactaagcactgggggggtgcaacagtgagctgaaaataagaagtggagacaggtgtgctacctttgttagttccgtacggattgccaccattctctcggtttccttcactctccaggaggcaactgcagaggagaatggacaag

SEQ ID NO: 3063 - DNA, 200 bp, Lolium multiflorum
ggagcaacggtagaggaaggcccggactactgcattatcacaccaccagagaagctgaacgtcacggcgatcgacacctacgatgaccaccggatggcgatggccttctccctcgctgcctgtgcagaggtgcctgtcacgatcagggaccctgggtgcacccgcaagaccttccccaactactttgatgtgctaagcac

SEQ ID NO: 3064 - DNA, 200 bp, Lolium multiflorum
gtgcttagcacatcaaagtagttggggaaggtcttgcgggtgcacccagggtccctgatcgtgacaggcacctctgcacaggcagcgagggagaaggccatcgccatccggtggtcatcgtaggtgtcgatcgccgtgacgttcagcttctctggtggtgtgataatgcagtagtccgggccttcctctaccgttgctcc

SEQ ID NO: 3065 - DNA, 200 bp, Lolium multiflorum
gataaactgatctctgttccttatgttgaaatgacattgagattgatggagcgttttggcgtgacggcagagcattctgatagctgggacagattctacattaaaggaggacagaagtacaagtaagttttgaattgttctgcttattctaagcatttgtcacatttgacttctggataaactacagaattgaatattag

SEQ ID NO: 3066 - DNA, 200 bp, Lolium multiflorum
ctaatattcaattctgtagtttatccagaagtcaaatgtgacaaatgcttagaataagcagaacaattcaaaacttacttgtacttctgtcctcctttaatgtagaatctgtcccagctatcagaatgctctgccgtcacgccaaaacgctccatcaatctcaatgtcatttcaacataaggaacagagatcagtttatc

SEQ ID NO: 3067 - DNA, 200 bp, Lolium multiflorum
gataaactacagaattgaatattagaaagaaatattgactgctcaagtaactttatttatctggaaatgaccatgctgttattagctatgaagtcaagctttactaggaaatcagtgccttaggcaattgactatgctacttacaatgcactggctgcacagctatgttttctggtgcataaacatttattcatctggct

SEQ ID NO: 3068 - DNA, 200 bp, Lolium multiflorum
agccagatgaataaatgtttatgcaccagaaaacatagctgtgcagccagtgcattgtaagtagcatagtcaattgcctaaggcactgatttcctagtaaagcttgacttcatagctaataacagcatggtcatttccagataaataaagttacttgagcagtcaatatttctttctaatattcaattctgtagtttatc

SEQ ID NO: 3069 - DNA, 200 bp, Lolium multiflorum
tgcataaacatttattcatctggctaggaccaaacttttagtagctatgaactgtactaggaaatcactgcctaggcaaaactccacaatttacaatgacattgcatggttttattttcttgtgcataaatttggtcacatcagaagtgccatccatctaaaaaatcggcgaaaattgagaacataggcagcttaatgac

SEQ ID NO: 3070 - DNA, 200 bp, Lolium multiflorum
gtcattaagctgcctatgttctcaattttcgccgattttttagatggatggcacttctgatgtgaccaaatttatgcacaagaaaataaaaccatgcaatgtcattgtaaattgtggagttttgcctaggcagtgatttcctagtacagttcatagctactaaaagtttggtcctagccagatgaataaatgtttatgca

SEQ ID NO: 3071 - DNA, 200 bp, Lolium multiflorum
ttgagaacataggcagcttaatgacagcggtttggcaataagcattttttgcagacgattcttgctttgcttcttttagccctttttattgttatataccctgccaaatgtcgcatcaggatatctgctgccaaatgttgcatcaggatatggatcgtggttttactgagcatacttcactgatgtaattgaaaactgtc

SEQ ID NO: 3072 - DNA, 200 bp, Lolium multiflorum
gacagttttcaattacatcagtgaagtatgctcagtaaaaccacgatccatatcctgatgcaacatttggcagcagatatcctgatgcgacatttggcagggtatataacaataaaaagggctaaaagaagcaaagcaagaatcgtctgcaaaaaatgcttattgccaaaccgctgtcattaagctgcctatgttctcaa

SEQ ID NO: 3073 - DNA, 200 bp, Lolium multiflorum
ttcactgatgtaattgaaaactgtcagttcaaacttcataaaagttgtagtaatggcttcctaacaagccctcccttgctctggaatttacaattgacaggtcccctggaaatgcctatgtcgaaggtgatgcctcaagtgcgagctatttcttggctggcgctgcaatcactggaggaactgtgactgtccaaggttgc

SEQ ID NO: 3074 - DNA, 200 bp, Lolium multiflorum
gcaaccttggacagtcacagttcctccagtgattgcagcgccagccaagaaatagctcgcacttgaggcatcaccttcgacataggcatttccaggggacctgtcaattgtaaattccagagcaagggagggcttgttaggaagccattactacaacttttatgaagtttgaactgacagttttcaattacatcagtgaa

SEQ ID NO: 3075 - DNA, 200 bp, Lolium multiflorum
aggaactgtgactgtccaaggttgcggcaccaccagtttgcaggtagaactgtactatcagtttttaccattggttaagcatacttgcagtataacataatcaaagatatactgctgtcaaccaaacatgctttaagtggacattcatttatgaatctataatataactacagtaccgtaatttggttttcttgtgctat

SEQ ID NO: 3076 - DNA, 200 bp, Lolium multiflorum
atagcacaagaaaaccaaattacggtactgtagttatattatagattcataaatgaatgtccacttaaagcatgtttggttgacagcagtatatctttgattatgttatactgcaagtatgcttaaccaatggtaaaaactgatagtacagttctacctgcaaactggtggtgccgcaaccttggacagtcacagttcct

SEQ ID NO: 3077 - DNA, 200 bp, Lolium multiflorum
ccgtaatttggttttcttgtgctatatccctgatgatgcctaatattgcagggtgatgtgaaatttgctgaggtactagaaatgatgggagcaaaggttacatggaccgacactagtgtaactgttactggtccaccgcgtcagccctttggacggaaacaccttaaagctgttgatgtcaacatgaacaaaatgcctga

SEQ ID NO: 3078 - DNA, 200 bp, Lolium multiflorum
tcaggcattttgttcatgttgacatcaacagctttaaggtgtttccgtccaaagggctgacgcggtggaccagtaacagttacactagtgtcggtccatgtaacctttgctcccatcatttctagtacctcagcaaatttcacatcaccctgcaatattaggcatcatcagggatatagcacaagaaaaccaaattacgg

SEQ ID NO: 3079 - DNA, 200 bp, Lolium multiflorum
atgtcaacatgaacaaaatgcctgatgttgccatgactcttgccgtcgttgccctttttgccgatggtccaactgctatcagagatggtaaaccgtcttatgtgttgctgttgatttcatttggatggatttagctacagcgcatgatttgttgctgacacttgtccattctcctctgcagttgcctcctggagagtgaa

SEQ ID NO: 3080 - DNA, 200 bp, Lolium multiflorum
ttcactctccaggaggcaactgcagaggagaatggacaagtgtcagcaacaaatcatgcgctgtagctaaatccatccaaatgaaatcaacagcaacacataagacggtttaccatctctgatagcagttggaccatcggcaaaaagggcaacgacggcaagagtcatggcaacatcaggcattttgttcatgttgacat

SEQ ID NO: 3081 - DNA, 200 bp, Lolium multiflorum
ctgcagttgcctcctggagagtgaaggaaaccgagagaatggtggcaatccggacggaactaacaaaggtagcacacctatctccacttcttatatttcagctcactgttgcactccccagtgcttagtctcacctgttgtgtgcctcgtgctatagctgggagcaacggtagaggaaggcccggactactgcattatca

SEQ ID NO: 3082 - DNA, 200 bp, Lolium multiflorum
tgataatgcagtagtccgggccttcctctaccgttgctcccagctatagcacgaggcacacaacaggtgagactaagcactggggagtgcaacagtgagctgaaatataagaagtggagataggtgtgctacctttgttagttccgtccggattgccaccattctctcggtttccttcactctccaggaggcaactgcag

SEQ ID NO: 3083 - DNA, 200 bp, Lolium multiflorum
gaaggcccggactactgcattatcacaccaccagagaagctgaacgtcacggcgatcgacacctacgatgaccaccggatggcgatggccttctcccttgccgcttgtgctgaggtgcctgtcacgatcagggaccccgggtgcacccgcaagaccttccccaactactttgacgtgctaagcaccttcgtgaagaacta

SEQ ID NO: 3084 - DNA, 200 bp, Lolium multiflorum
tagttcttcacgaaggtgcttagcacgtcaaagtagttggggaaggtcttgcgggtgcacccggggtccctgatcgtgacaggcacctcagcacaagcggcaagggagaaggccatcgccatccggtggtcatcgtaggtgtcgatcgccgtgacgttcagcttctctggtggtgtgataatgcagtagtccgggccttc

SEQ ID NO: 3085 - DNA, 200 bp, Lolium multiflorum
tgctaagcaccttcgtgaagaactagctccttttgtagcctgtccatggtttgaggaaatttttactgttttggtccttcttgcgaaatgatttatgagtctgtaatactagttttgtagcatgtcgtgggccttttgaggtaaaatgagttgtaatgcataccgagttcgttttgaataagaagcaagttaggcgtacc

SEQ ID NO: 3086 - DNA, 200 bp, Lolium multiflorum
ggtacgcctaacttgcttcttattcaaaacgaactcggtatgcattacaactcattttacctcaaaaggcccacgacatgctacaaaactagtattacagactcataaatcatttcgcaagaaggaccaaaacagtaaaaatttcctcaaaccatggacaggctacaaaaggagctagttcttcacgaaggtgcttagca

SEQ ID NO: 3087 - DNA, 200 bp, Lolium multiflorum
gaataagaagcaagttaggcgtaccatactgtgatctagatgttcgtctttcgtttccagaaatattatgttggctgctggtactcgagtgtgttcgaaaacaacatgatagccatgggatttgggagatgacatgtgggtatgtggctacttgaggaagatcttcatcaaagcaaccaagaacaccagccgatggtaaa

SEQ ID NO: 3088 - DNA, 200 bp, Lolium multiflorum
tttaccatcggctggtgttcttggttgctttgatgaagatcttcctcaagtagccacatacccacatgtcatctcccaaatcccatggctatcatgttgttttcgaacacactcgagtaccagcagccaacataatatttctggaaacgaaagacgaacatctagatcacagtatggtacgcctaacttgcttcttattc

SEQ ID NO: 3089 - DNA, 200 bp, Lolium multiflorum
accaagaacaccagccgatggtaaaacagtgcagcttgcacgaagaacgtttgcctacactgcttggtaaaagcgaaggtttggtttgataaatttctcagcagtattttgtaatgcttcgatggtaattcttctacgcaaaccatcagcctcaatagtaatcctgtgcagtatttttttagtagccctcggcacgcttg

SEQ ID NO: 3090 - DNA, 200 bp, Lolium multiflorum
caagcgtgccgagggctactaaaaaaatactgcacaggattactattgaggctgatggtttgcgtagaagaattaccatcgaagcattacaaaatactgctgagaaatttatcaaaccaaaccttcgcttttaccaagcagtgtaggcaaacgttcttcgtgcaagctgcactgttttaccatcggctggtgttcttggt

SEQ ID NO: 3091 - DNA, 200 bp, Lolium multiflorum
tttttagtagccctcggcacgcttgaactgtaattcttcaactaaaaactcagcttgaaaataattattcgttgttaattgttcaacaataattttcctagcgcttaattggtgagaggtaattctcagcagcagtaattctcccaatgcaaaatctttaactccaattggagcggcttctccacactccaccgtgcttc

SEQ ID NO: 3092 - DNA, 200 bp, Lolium multiflorum
gaagcacggtggagtgtggagaagccgctccaattggagttaaagattttgcattgggagaattactgctgctgagaattacctctcaccaattaagcgctaggaaaattattgttgaacaattaacaacgaataattattttcaagctgagtttttagttgaagaattacagttcaagcgtgccgagggctactaaaaa

SEQ ID NO: 3093 - DNA, 200 bp, Lolium multiflorum
gcttctccacactccaccgtgcttcactgtagagcttcatcttttaccaacctggacccgcggaacaagaaggtcatggttacatggaccatggtacaggaaacagagcaggccacacgagacacgactatagcagcacatcgttggttccccacaaccgattccagcgactggcctggcggcgcgcatgtagagcaggc

SEQ ID NO: 3094 - DNA, 200 bp, Lolium multiflorum
gcctgctctacatgcgcgccgccaggccagtcgctggaatcggttgtggggaaccaacgatgtgctgctatagtcgtgtctcgtgtggcctgctctgtttcctgtaccatggtccatgtaaccatgaccttcttgttccgcgggtccaggttggtaaaagatgaagctctacagtgaagcacggtggagtgtggagaagc

SEQ ID NO: 3095 - DNA, 200 bp, Lolium multiflorum
ctggcggcgcgcatgtagagcaggcgaccggtgagacacaacggtacttcaccggcggctcctatggatttcacatggaggctgtgagcaggtaagtgcgtgtttttttctcgattggaaactatgggtgagaaatttgtccccaattatggcgggcggccgattatttctgccattgcggtgcgccaatctacgagggc

SEQ ID NO: 3096 - DNA, 200 bp, Lolium multiflorum
gccctcgtagattggcgcaccgcaatggcagaaataatcggccgcccgccataattggggacaaatttctcacccatagtttccaatcgagaaaaaaacacgcacttacctgctcacagcctccatgtgaaatccataggagccgccggtgaagtaccgttgtgtctcaccggtcgcctgctctacatgcgcgccgccag

SEQ ID NO: 3097 - DNA, 200 bp, Lolium multiflorum
ttgcggtgcgccaatctacgagggcacagttgttgtgcctgaaaatggtgcaaatccatccgtgatgcagtgctggaaggcggtgcctgcagccatgtcgggtcagttgagccagatccatccgtggcgggcatcttgcaagtgctacctagcaggtgccgacaacggaaaaggggacggggaggccgattcaacgcagt

SEQ ID NO: 3098 - DNA, 200 bp, Lolium multiflorum
actgcgttgaatcggcctccccgtccccttttccgttgtcggcacctgctaggtagcacttgcaagatgcccgccacggatggatctggctcaactgacccgacatggctgcaggcaccgccttccagcactgcatcacggatggatttgcaccattttcaggcacaacaactgtgccctcgtagattggcgcaccgcaa

SEQ ID NO: 3099 - DNA, 200 bp, Lolium multiflorum
gacggggaggccgattcaacgcagtgcaccatgaatcagacatcgatggaccgcgccaagaggtaaaaaagtaaatcatattcgtaatttctgaaattttggaaaatgtcagtcattgtgtaggtggataacatataaaaagcagcccaggaatctgagtttggtagaccggtgtaagcaacacatgagaattggccagg

SEQ ID NO: 3100 - DNA, 200 bp, Lolium multiflorum
cctggccaattctcatgtgttgcttacaccggtctaccaaactcagattcctgggctgctttttatatgttatccacctacacaatgactgacattttccaaaatttcagaaattacgaatatgatttacttttttacctcttggcgcggtccatcgatgtctgattcatggtgcactgcgttgaatcggcctccccgtc

SEQ ID NO: 3101 - DNA, 200 bp, Lolium multiflorum
aagcaacacatgagaattggccaggataaaagaaaaatcatgtcgatttgagtaagctgatcgtccatggtcagttaaagaattgttattgtgaatgatgcagtgatgtgaagttagtgaacattagaaggggttgtgcgttgtagttaaagttcaaatttagctggaaatggcatgaatctgagccaggttgtgaactc

SEQ ID NO: 3102 - DNA, 200 bp, Lolium multiflorum
gagttcacaacctggctcagattcatgccatttccagctaaatttgaactttaactacaacgcacaaccccttctaatgttcactaacttcacatcactgcatcattcacaataacaattctttaactgaccatggacgatcagcttactcaaatcgacatgatttttcttttatcctggccaattctcatgtgttgctt

SEQ ID NO: 3103 - DNA, 200 bp, Lolium multiflorum
tgaatctgagccaggttgtgaactcctgaggtatgaagttctgtatagaaaagaaattgttcagttgttgagtgaactggatgtaggtaagtggcagtgatgataaggtagaatttacacatacaaagatagcatgaatttgtagccctggctagcaggttgccaacagttatcagtttgtgcagttgcgtgtaaaaagg

SEQ ID NO: 3104 - DNA, 200 bp, Lolium multiflorum
cctttttacacgcaactgcacaaactgataactgttggcaacctgctagccagggctacaaattcatgctatctttgtatgtgtaaattctaccttatcatcactgccacttacctacatccagttcactcaacaactgaacaatttcttttctatacagaacttcatacctcaggagttcacaacctggctcagattca

SEQ ID NO: 3105 - DNA, 200 bp, Lolium multiflorum
gtttgtgcagttgcgtgtaaaaaggaaaaatgatgatgaaagaattagtatgagtgttctgtagacctaactaacctatggtagatgttgcgaacctgtgcaggataaagatgggtcaggcgccatcagacatggcgccatgtctttcgagaccgagtgctcttgagaaatcaatatgtggctacacagaaaagctaggt

SEQ ID NO: 3106 - DNA, 200 bp, Lolium multiflorum
acctagcttttctgtgtagccacatattgatttctcaagagcactcggtctcgaaagacatggcgccatgtctgatggcgcctgacccatctttatcctgcacaggttcgcaacatctaccataggttagttaggtctacagaacactcatactaattctttcatcatcatttttcctttttacacgcaactgcacaaac

SEQ ID NO: 3107 - DNA, 200 bp, Lolium multiflorum
atgtggctacacagaaaagctaggttgggaggggtgcacatggagacacaatggttgccggtgcaatagcgggtacagaacagacacaaaaatacctttgatgtttgcatgcattggctgaacagaattagatcacgtatttgcaggggttccagaaaaaaatgcagcacactgaggccgagggggttgctgctggatta

SEQ ID NO: 3108 - DNA, 200 bp, Lolium multiflorum
taatccagcagcaaccccctcggcctcagtgtgctgcatttttttctggaacccctgcaaatacgtgatctaattctgttcagccaatgcatgcaaacatcaaaggtatttttgtgtctgttctgtacccgctattgcaccggcaaccattgtgtctccatgtgcacccctcccaacctagcttttctgtgtagccacat

SEQ ID NO: 3109 - DNA, 200 bp, Lolium multiflorum
ggccgagggggttgctgctggattatcatccgatgaaatatttacaagataactacatgagctctacagtttgaacagtacgttccaatatcactagttttaataatttatccaaacacatctgtaaagaaaatgcagataataacgttgatctgacatgtttggtcagttcttgacgtggacaaggtaacaagtgaaac

SEQ ID NO: 3110 - DNA, 200 bp, Lolium multiflorum
gtttcacttgttaccttgtccacgtcaagaactgaccaaacatgtcagatcaacgttattatctgcattttctttacagatgtgtttggataaattattaaaactagtgatattggaacgtactgttcaaactgtagagctcatgtagttatcttgtaaatatttcatcggatgataatccagcagcaaccccctcggcc

SEQ ID NO: 3111 - DNA, 200 bp, Lolium multiflorum
acgtggacaaggtaacaagtgaaacaataaaaggcgctacagtctcggcacacgctagtcgagttgcatctctcggaggaaaaggtgctcctaaattttcagcaggtgagttctccttctgtttgcagcacacctcgtgtttgtattccccatgatggaaaaattaaggggtatgcatgattttaattcagaaaattgtg

SEQ ID NO: 3112 - DNA, 200 bp, Lolium multiflorum
cacaattttctgaattaaaatcatgcataccccttaatttttccatcatggggaatacaaacacgaggtgtgctgcaaacagaaggagaactcacctgctgaaaatttaggagcaccttttcctccgagagatgcaactcgactagcgtgtgccgagactgtagcgccttttattgtttcacttgttaccttgtccacgt

SEQ ID NO: 3113 - DNA, 200 bp, Lolium multiflorum
catgattttaattcagaaaattgtgtggctccgcagatgccccgtccaattgtggagctgttgtgatatcgaggaactaaagtgccagaaatggatgatgacgtgctagatgctccaggggctgaaacggtggcgtcaaacccgtccatgcctatctgaggtaggagaaacaaacgagatcacactggtttacctttgaa

SEQ ID NO: 3114 - DNA, 200 bp, Lolium multiflorum
ttcaaaggtaaaccagtgtgatctcgtttgtttctcctacctcagataggcatggacgggtttgacgccaccgtttcagcccctggagcatctagcacgtcatcatccatttctggcactttagttcctcgatatcacaacagctccacaattggacggggcatctgcggagccacacaattttctgaattaaaatcatg

SEQ ID NO: 3115 - DNA, 200 bp, Lolium multiflorum
gagatcacactggtttacctttgaatgcactatgcaccgaagagagttcggtttgcatctggtgccacctcagtgggtggacaatctagcatgagagggtaggaatctcatggacgcatgtaattttcacagagacctgtgttttatgttgtggggtgtgcaaattcagtaacctaatgatgcctactttttgtcaagaa

SEQ ID NO: 3116 - DNA, 200 bp, Lolium multiflorum
ttcttgacaaaaagtaggcatcattaggttactgaatttgcacaccccacaacataaaacacaggtctctgtgaaaattacatgcgtccatgagattcctaccctctcatgctagattgtccacccactgaggtggcaccagatgcaaaccgaactctcttcggtgcatagtgcattcaaaggtaaaccagtgtgatctc

SEQ ID NO: 3117 - DNA, 200 bp, Lolium multiflorum
aatgatgcctactttttgtcaagaaaaatatagttaatgagtctggctgatcgtgaggaactgacagctacctaatcgggcagtggtaatgggtttagctgtgcatatttgtgatagtgtgctcatagattcttctaattctgataatggtttacggttatccgtaggtcaaggaggacatagtgatagggagtgcaaag

SEQ ID NO: 3118 - DNA, 200 bp, Lolium multiflorum
ctttgcactccctatcactatgtcctccttgacctacggataaccgtaaaccattatcagaattagaagaatctatgagcacactatcacaaatatgcacagctaaacccattaccactgcccgattaggtagctgtcagttcctcacgatcagccagactcattaactatatttttcttgacaaaaagtaggcatcatt

SEQ ID NO: 3119 - DNA, 200 bp, Lolium multiflorum
ggacatagtgatagggagtgcaaagacgaccagtacaactcatcatggtgcatcagcagcagctggtaattcatgaatttgagtatatacctgggatacaaaaggtgagggttggataagtcttaatgccatgttatactgcgtattcagcaggtgcagcgagtggcgacgtatccagggggcgtcgtccagttgaagcc

SEQ ID NO: 3120 - DNA, 200 bp, Lolium multiflorum
ggcttcaactggacgacgccccctggatacgtcgccactcgctgcacctgctgaatacgcagtataacatggcattaagacttatccaaccctcaccttttgtatcccaggtatatactcaaattcatgaattaccagctgctgctgatgcaccatgatgagttgtactggtcgtctttgcactccctatcactatgtcc

SEQ ID NO: 3121 - DNA, 200 bp, Lolium multiflorum
cagggggcgtcgtccagttgaagcctcggcactataactggtatgtcgtgctcaagtggtaatgacattactatgtgatggtgaaaaaactttgcagttgagtgtactccgaatctgatatggctagttgttgcgcactgtctgaaagttgtgcttctaccctttgctgtaggtatacggactttcgttcagcttccagg

SEQ ID NO: 3122 - DNA, 200 bp, Lolium multiflorum
cctggaagctgaacgaaagtccgtatacctacagcaaagggtagaagcacaactttcagacagtgcgcaacaactagccatatcagattcggagtacactcaactgcaaagttttttcaccatcacatagtaatgtcattaccacttgagcacgacataccagttatagtgccgaggcttcaactggacgacgccccctg

SEQ ID NO: 3123 - DNA, 200 bp, Lolium multiflorum
tacggactttcgttcagcttccaggcatagagaagcacattcggtgctcattcagatagacgataaggattgcgcgaagagagagctagactagcagttcccaatcacagacgatgcaggggtgcagcatgatcagccagtccttcaatatggatgagatgggcgaagccatggatctcggggaatgtatccacaaagat

SEQ ID NO: 3124 - DNA, 200 bp, Lolium multiflorum
atctttgtggatacattccccgagatccatggcttcgcccatctcatccatattgaaggactggctgatcatgctgcacccctgcatcgtctgtgattgggaactgctagtctagctctctcttcgcgcaatccttatcgtctatctgaatgagcaccgaatgtgcttctctatgcctggaagctgaacgaaagtccgta

SEQ ID NO: 3125 - DNA, 200 bp, Lolium multiflorum
tctcggggaatgtatccacaaagataccacccctgttccgcaatgaaggagttctagtcgtgagcaatgctacatctaggggctcgtttttacaaaatcgaacttacgggctgacgtggagaatcatggagggattaaggttcctcaaatcaaatcatgggaggagaaagatttgcaccacccacgttcatccacctcat

SEQ ID NO: 3126 - DNA, 200 bp, Lolium multiflorum
atgaggtggatgaacgtgggtggtgcaaatctttctcctcccatgatttgatttgaggaaccttaatccctccatgattctccacgtcagcccgtaagttcgattttgtaaaaacgagcccctagatgtagcattgctcacgactagaactccttcattgcggaacaggggtggtatctttgtggatacattccccgaga

SEQ ID NO: 3127 - DNA, 200 bp, Lolium multiflorum
caccacccacgttcatccacctcatcccgtaaaaccaccccgtaacaaaaatcccataggtgtaggattattggtttattaatcgggatactgactccaatactcacaaatatacgcacatgggcttccatctgtctgggcatgattggtccaggacgcgagtgtagatgcacccgggagccaaaccacatttccttctc

SEQ ID NO: 3128 - DNA, 200 bp, Lolium multiflorum
gagaaggaaatgtggtttggctcccgggtgcatctacactcgcgtcctggaccaatcatgcccagacagatggaagcccatgtgcgtatatttgtgagtattggagtcagtatcccgattaataaaccaataatcctacacctatgggatttttgttacggggtggttttacgggatgaggtggatgaacgtgggtggtg

SEQ ID NO: 3129 - DNA, 200 bp, Lolium multiflorum
gggagccaaaccacatttccttctctcgaagctaaaactcgtttagtttttcattagttaggctcaggttattcagatcttttttacgttgctagcaatgacaattgtcacaattccaagtgtcatgcagcaaagcagacgccactctttcacgcatagaacaacgatataatctgcagagatactgccgaaatgctaac

SEQ ID NO: 3130 - DNA, 200 bp, Lolium multiflorum
gttagcatttcggcagtatctctgcagattatatcgttgttctatgcgtgaaagagtggcgtctgctttgctgcatgacacttggaattgtgacaattgtcattgctagcaacgtaaaaaagatctgaataacctgagcctaactaatgaaaaactaaacgagttttagcttcgagagaaggaaatgtggtttggctccc

SEQ ID NO: 3131 - DNA, 200 bp, Lolium multiflorum
gcagagatactgccgaaatgctaacaatatcaatagcaagccatatatataaacttccaatcagatacaccagagagcaatgaaaattggtgatgatgataactcagacgatagggactcagaatcgtgatgcaaagaacctagtcatacaaaaaccggtctcatactagaaattcaaagacatgtcattctctggtgtc

SEQ ID NO: 3132 - DNA, 200 bp, Lolium multiflorum
gacaccagagaatgacatgtctttgaatttctagtatgagaccggtttttgtatgactaggttctttgcatcacgattctgagtccctatcgtctgagttatcatcatcaccaattttcattgctctctggtgtatctgattggaagtttatatatatggcttgctattgatattgttagcatttcggcagtatctctgc

SEQ ID NO: 3133 - DNA, 200 bp, Lolium multiflorum
caaagacatgtcattctctggtgtctctccacctttttaataaacagataaaaggcactgggtaggataactactggtcggtgatggtcacttcgacctcgacaccaggctcgatagtgatagaggtgatctgcttcacaacgtctggggagctgacaaggtcaatcaccctcttgtgcacccgcatctcgaaccgatcc

SEQ ID NO: 3134 - DNA, 200 bp, Lolium multiflorum
ggatcggttcgagatgcgggtgcacaagagggtgattgaccttgtcagctccccagacgttgtgaagcagatcacctctatcactatcgagcctggtgtcgaggtcgaagtgaccatcaccgaccagtagttatcctacccagtgccttttatctgtttattaaaaaggtggagagacaccagagaatgacatgtctttg

SEQ ID NO: 3135 - DNA, 200 bp, Lolium multiflorum
gtgcacccgcatctcgaaccgatcccaggtgttggtacctgatttaacaaaacagagttagccatttcattttggaagatgatgaagcttcagcatagctgcaggtaatgaatgatctgtgacaggctgagcatcagttttaaaaagctcgattttgaaacatcaaatgtatcagacaaaatcatatggaatcatcatct

SEQ ID NO: 3136 - DNA, 200 bp, Lolium multiflorum
agatgatgattccatatgattttgtctgatacatttgatgtttcaaaatcgagctttttaaaactgatgctcagcctgtcacagatcattcattacctgcagctatgctgaagcttcatcatcttccaaaatgaaatggctaactctgttttgttaaatcaggtaccaacacctgggatcggttcgagatgcgggtgcac

SEQ ID NO: 3137 - DNA, 200 bp, Lolium multiflorum
acaaaatcatatggaatcatcatctgctcagcccatccacaggatacatgtttcctttccaaaaaaattaaatcaggcgttattgaacaacaagatcttactgccagtagtgctggaagaaccactagacgaattgtatgtagagcaacaaacaagcattatacaggctaatcatcagttttaaaaagctcgattgtgat

SEQ ID NO: 3138 - DNA, 200 bp, Lolium multiflorum
atcacaatcgagctttttaaaactgatgattagcctgtataatgcttgtttgttgctctacatacaattcgtctagtggttcttccagcactactggcagtaagatcttgttgttcaataacgcctgatttaatttttttggaaaggaaacatgtatcctgtggatgggctgagcagatgatgattccatatgattttgt

SEQ ID NO: 3139 - DNA, 200 bp, Lolium multiflorum
cagttttaaaaagctcgattgtgattcctcaaagaaaatctcaggaataacttggtttagcatcatctgatcagcccgttacagaacaaaggtgtaaaaactagcagcacacactcttaacagtagagactgggttacataaatggaggtaatatgtatgaaatacaactgaggtatgctgagaagtgttcatgtttagg

SEQ ID NO: 3140 - DNA, 200 bp, Lolium multiflorum
cctaaacatgaacacttctcagcatacctcagttgtatttcatacatattacctccatttatgtaacccagtctctactgttaagagtgtgtgctgctagtttttacacctttgttctgtaacgggctgatcagatgatgctaaaccaagttattcctgagattttctttgaggaatcacaatcgagctttttaaaactg

SEQ ID NO: 3141 - DNA, 200 bp, Lolium multiflorum
atgctgagaagtgttcatgtttaggatcacaaataaatcagcagatcgccagaagcaatgaatgtacttgctgcagattagcccctagctaacttactagaaaaacccaagcatcagttttaaaaagctcggtttaagatacttcaacgatggaacatctcagtagcatctccttgtaacatcacatgctcagtttacag

SEQ ID NO: 3142 - DNA, 200 bp, Lolium multiflorum
ctgtaaactgagcatgtgatgttacaaggagatgctactgagatgttccatcgttgaagtatcttaaaccgagctttttaaaactgatgcttgggtttttctagtaagttagctaggggctaatctgcagcaagtacattcattgcttctggcgatctgctgatttatttgtgatcctaaacatgaacacttctcagcat

SEQ ID NO: 3143 - DNA, 200 bp, Lolium multiflorum
gggcggtgctctggagaaggtcgtgctgcagcccatccgggagatctccggcgccgtgcagctgcccggctccaagtcgctctccaaccggatccttctcctctccgccttgtccgaggtgagaaaacaagcagacaaagcccctctccctacttctcccctttgtgtgaattgggtgccgagatggtttaggagcacct

SEQ ID NO: 3144 - DNA, 200 bp, Lolium multiflorum
aggtgctcctaaaccatctcggcacccaattcacacaaaggggagaagtagggagaggggctttgtctgcttgttttctcacctcggacaaggcggagaggagaaggatccggttggagagcgacttggagccgggcagctgcacggcgccggagatctcccggatgggctgcagcacgaccttctccagagcaccgccc

SEQ ID NO: 3145 - DNA, 200 bp, Lolium multiflorum
gtgccgagatggtttaggagcaccttatcatgcttggtgctcgtgagatcataagatttttttctttttacttaaaacgatctagccataggatttagttcaaggttactcttcttagtagccaattcctatattcgtttatcgaatcgttagaattatgtagttagttggatcaatattatatgtggccttggatgagc

SEQ ID NO: 3146 - DNA, 200 bp, Lolium multiflorum
gctcatccaaggccacatataatattgatccaactaactacataattctaacgattcgataaacgaatataggaattggctactaagaagagtaaccttgaactaaatcctatggctagatcgttttaagtaaaaagaaaaaaatcttatgatctcacgagcaccaagcatgataaggtgctcctaaaccatctcggcac

SEQ ID NO: 3147 - DNA, 200 bp, Lolium multiflorum
gtagtagctgctggtggaaatgcgacgtatgtttcttttttttatccttacgggaataagtatgagttccgtggttatgctttgagactgatggtttacgtctctcttctgaacttcagttatgttcttgatggagtaccaagaatgatggagcgtcctatcggtgacttaggtgtcggtttgaaacaactaggtgcgag

SEQ ID NO: 3148 - DNA, 200 bp, Lolium multiflorum
ctcgcacctagttgtttcaaaccgacacctaagtcaccgataggacgctccatcattcttggtactccatcaagaacataactgaagttcagaagagagacgtaaaccatcagtctcaaagcataaccacggaactcatacttattcccgtaaggataaaaaaaagaaacatacgtcgcatttccaccagcagctactac

SEQ ID NO: 3149 - DNA, 200 bp, Lolium multiflorum
tcggtttgaaacaactaggtgcgagtgttgattgtttcctcggcactgactgcccacctgttcgtatcaacggcattggagggctacctggtggcaaggttagcttcatgaacttccatgttatacgcttttgtacaaacatttcacttgtctggagaaaaaacaagattactgacagagtgagagtagtacggtgcaat

SEQ ID NO: 3150 - DNA, 200 bp, Lolium multiflorum
attgcaccgtactactctcactctgtcagtaatcttgttttttctccagacaagtgaaatgtttgtacaaaagcgtataacatggaagttcatgaagctaaccttgccaccaggtagccctccaatgccgttgatacgaacaggtgggcagtcagtgccgaggaaacaatcaacactcgcacctagttgtttcaaaccga

SEQ ID NO: 3151 - DNA, 200 bp, Lolium multiflorum
cagagtgagagtagtacggtgcaatgcgaccacacaataactccaaaattgccataaccaataggccctttttcgtgtaaaacagatatgctgattgtattgtggtcttagatcacatgggtctatcatgaactagcacttaacattgaaccacattccacaggttaagctgtctggttccatcagcagccaatacttga

SEQ ID NO: 3152 - DNA, 200 bp, Lolium multiflorum
tcaagtattggctgctgatggaaccagacagcttaacctgtggaatgtggttcaatgttaagtgctagttcatgatagacccatgtgatctaagaccacaatacaatcagcatatctgttttacacgaaaaagggcctattggttatggcaattttggagttattgtgtggtcgcattgcaccgtactactctcactctg

SEQ ID NO: 3153 - DNA, 200 bp, Lolium multiflorum
ggttccatcagcagccaatacttgagttccttgctgatggctgctcctttagctcttggggatgtcgagattgaaatcattgataaactgatctctgttccttacgttgaaatgacattgagattgatggagcgttttggcgtgacggcagagcattctgatagctgggacagattctacattaaaggaggacagaagta

SEQ ID NO: 3154 - DNA, 200 bp, Lolium multiflorum
tacttctgtcctcctttaatgtagaatctgtcccagctatcagaatgctctgccgtcacgccaaaacgctccatcaatctcaatgtcatttcaacgtaaggaacagagatcagtttatcaatgatttcaatctcgacatccccaagagctaaaggagcagccatcagcaaggaactcaagtattggctgctgatggaacc

SEQ ID NO: 3155 - DNA, 200 bp, Lolium multiflorum
tctacattaaaggaggacagaagtacaagtaagttttgaattgtgctgcttattctaaacatttgtccaaacatttgacttctggataaactagggaattgagcattggaaagaactattggctgctcaactttattcatctggaaatgaccatactgttattagctaagtcaagctttactatgaaatcagtgactctg

SEQ ID NO: 3156 - DNA, 200 bp, Lolium multiflorum
cagagtcactgatttcatagtaaagcttgacttagctaataacagtatggtcatttccagatgaataaagttgagcagccaatagttctttccaatgctcaattccctagtttatccagaagtcaaatgtttggacaaatgtttagaataagcagcacaattcaaaacttacttgtacttctgtcctcctttaatgtaga

SEQ ID NO: 3157 - DNA, 200 bp, Lolium multiflorum
ctttactatgaaatcagtgactctgctacttacaatgcactggctgcacaactatgttttctggtgcataaactatagtctgcccaaataactaccaaacttgtagtagctatgaactgtacaaggaaatcagtgtggcaaaactccgctacttacaatggcattgcatggttatattttgttgtgcataaacttggtca

SEQ ID NO: 3158 - DNA, 200 bp, Lolium multiflorum
tgaccaagtttatgcacaacaaaatataaccatgcaatgccattgtaagtagcggagttttgccacactgatttccttgtacagttcatagctactacaagtttggtagttatttgggcagactatagtttatgcaccagaaaacatagttgtgcagccagtgcattgtaagtagcagagtcactgatttcatagtaaag

SEQ ID NO: 3159 - DNA, 200 bp, Lolium rigidium
aaacaacatcatatggtttcttttgtctttatgactagaccactctttattattccttgtattgggatcttattttgaatggttgtttagcctacacctcatgttctagattttgttcgtataccagacttttcttgattgcgatctatttgtcccctggattttgcatagggtgatgtaaaatttgccgaagttcttga

SEQ ID NO: 3160 - DNA, 200 bp, Lolium rigidium
tcaagaacttcggcaaattttacatcaccctatgcaaaatccaggggacaaatagatcgcaatcaagaaaagtctggtatacgaacaaaatctagaacatgaggtgtaggctaaacaaccattcaaaataagatcccaatacaaggaataataaagagtggtctagtcataaagacaaaagaaaccatatgatgttgttt

SEQ ID NO: 3161 - DNA, 200 bp, Lolium rigidium
cgccacgtccgtggccgcgcccgcggcgccggccggcgcggaggaggtcgtgctgcagcccatccgggagatctccggcgccgtgcagctgcccggctccaagtcgctctccaaccggatccttctcctctccgccttgtccgaggtgagaaaacaagcagacaaagcccctctccctacttctcccctttgtgtgaatt

SEQ ID NO: 3162 - DNA, 200 bp, Lolium rigidium
aattcacacaaaggggagaagtagggagaggggctttgtctgcttgttttctcacctcggacaaggcggagaggagaaggatccggttggagagcgacttggagccgggcagctgcacggcgccggagatctcccggatgggctgcagcacgacctcctccgcgccggccggcgccgcgggcgcggccacggacgtggcg

SEQ ID NO: 3163 - DNA, 200 bp, Lolium rigidium
cctacttctcccctttgtgtgaattgggtgccgagatgggattttaggagggttaggtgcatcttatcatgctaggtgctcgtgagatcataagatttttttctttttacttaaaacgatctagccataggatttagttcaaggttactcttcttagtagccaattcctatgttcgtttatcgaatcgttagaattatgt

SEQ ID NO: 3164 - DNA, 200 bp, Lolium rigidium
acataattctaacgattcgataaacgaacataggaattggctactaagaagagtaaccttgaactaaatcctatggctagatcgttttaagtaaaaagaaaaaaatcttatgatctcacgagcacctagcatgataagatgcacctaaccctcctaaaatcccatctcggcacccaattcacacaaaggggagaagtagg

SEQ ID NO: 3165 - DNA, 200 bp, Lolium rigidium
gtttatcgaatcgttagaattatgtagttagttggatcaatattatatgaggccttggatgagcaaaagtcagttaatggtaattagaattatgtaggacctggtgatcctcttatgtcagtctgatggcttcctcatgaaagtattacgctgcaacgctgtcatggacacctagtattcatatacctgcattcaagatg

SEQ ID NO: 3166 - DNA, 200 bp, Lolium rigidium
catcttgaatgcaggtatatgaatactaggtgtccatgacagcgttgcagcgtaatactttcatgaggaagccatcagactgacataagaggatcaccaggtcctacataattctaattaccattaactgacttttgctcatccaaggcctcatataatattgatccaactaactacataattctaacgattcgataaac

SEQ ID NO: 3167 - DNA, 200 bp, Lolium rigidium
tcctctccgccttgtccgaggtgaccaaacaacccgaaacgcttccccctcctccccttcctttggggtgaattgggtgtactaaagatgggatttttggaggtttaggggcgcacttgtatcttgtcatgctaggtgctggccagatcataagatattctttcattcttattaagacgatctagccataagacatatac

SEQ ID NO: 3168 - DNA, 200 bp, Lolium rigidium
gtatatgtcttatggctagatcgtcttaataagaatgaaagaatatcttatgatctggccagcacctagcatgacaagatacaagtgcgcccctaaacctccaaaaatcccatctttagtacacccaattcaccccaaaggaaggggaggagggggaagcgtttcgggttgtttggtcacctcggacaaggcggagagga

SEQ ID NO: 3169 - DNA, 200 bp, Lolium rigidium
gacgatctagccataagacatatacttaagaaggtagtctgttcagtaggcaattcataagtctgttcacccaattattgcatacatactgtagcttgtatttgaatgaagatgatctcaccataggatactctactccattccaaatagattcaagttgtatgtgtcctaattaaaactatttctggtttcacagaaaa

SEQ ID NO: 3170 - DNA, 200 bp, Lolium rigidium
ttttctgtgaaaccagaaatagttttaattaggacacatacaacttgaatctatttggaatggagtagagtatcctatggtgagatcatcttcattcaaatacaagctacagtatgtatgcaataattgggtgaacagacttatgaattgcctactgaacagactaccttcttaagtatatgtcttatggctagatcgtc

SEQ ID NO: 3171 - DNA, 200 bp, Lolium rigidium
aaactatttctggtttcacagaaaagtgtgtcactttaatttcgttagtttcatcataaaatatattttttgtactgtactatagagatttgatgttgtatatattatcatttttctcgtctacaaactgggtcaaacgtagacaaggttgacacaggacaaacataagacttcgattaatttggaaccgagggagtggt

SEQ ID NO: 3172 - DNA, 200 bp, Lolium rigidium
accactccctcggttccaaattaatcgaagtcttatgtttgtcctgtgtcaaccttgtctacgtttgacccagtttgtagacgagaaaaatgataatatatacaacatcaaatctctatagtacagtacaaaaaatatattttatgatgaaactaacgaaattaaagtgacacacttttctgtgaaaccagaaatagttt

SEQ ID NO: 3173 - DNA, 200 bp, Lolium rigidium
attaatttggaaccgagggagtggtatgtttaccagacaaatcctatgttcgtttattgaatcattagaattatgtactagctattagttggatcaagatgatacataaggttaaaaggtattagtataatcaggtgatccttaggctggtcttttttttttcttctgatggcttctttatgaaagatttgtattgcaat

SEQ ID NO: 3174 - DNA, 200 bp, Lolium rigidium
attgcaatacaaatctttcataaagaagccatcagaagaaaaaaaaaagaccagcctaaggatcacctgattatactaataccttttaaccttatgtatcatcttgatccaactaatagctagtacataattctaatgattcaataaacgaacataggatttgtctggtaaacataccactccctcggttccaaattaat

SEQ ID NO: 3175 - DNA, 200 bp, Lolium rigidium
ctttatgaaagatttgtattgcaatggtgtcgtggacacttgataagaaactgaaactggtttactttgctggcatctctagttgatcgttagctgactattttgctcttcagggaacaacggtggtggataacctgttgaacagtgaggatgtccactacatgctcgaggccctggacgcgctcgggctctccgtggaa

SEQ ID NO: 3176 - DNA, 200 bp, Lolium rigidium
ttccacggagagcccgagcgcgtccagggcctcgagcatgtagtggacatcctcactgttcaacaggttatccaccaccgttgttccctgaagagcaaaatagtcagctaacgatcaactagagatgccagcaaagtaaaccagtttcagtttcttatcaagtgtccacgacaccattgcaatacaaatctttcataaag

SEQ ID NO: 3177 - DNA, 200 bp, Lolium rigidium
ggacgcgctcgggctctccgtggaagcagacaaagttgcaaaaagagctctagtcgtcggctgtggcggcaggttcccgattgagaaggatgccaaggaggaagtaaagctcttcttgggcaacgctggaactgcgatgcggccattgacggcggctgtagtagctgctggtggaaatgcaacgtatgtttcttttcttt

SEQ ID NO: 3178 - DNA, 200 bp, Lolium rigidium
aaagaaaagaaacatacgttgcatttccaccagcagctactacagccgccgtcaatggccgcatcgcagttccagcgttgcccaagaagagctttacttcctccttggcatccttctcaatcgggaacctgccgccacagccgacgactagagctctttttgcaactttgtctgcttccacggagagcccgagcgcgtcc

SEQ ID NO: 3179 - DNA, 200 bp, Lolium rigidium
aatgcaacgtatgtttcttttctttaatccttattatgggaataagtatgagttccgtggttatgctttgagactgatggtttatgtctctcttctgaacttcagttatgttcttgatggagtaccaagaatgagggagcgacctatcggtgacttagttgtcggtttgaaacaactaggtgcgaatgttgattgtttcc

SEQ ID NO: 3180 - DNA, 200 bp, Lolium rigidium
ggaaacaatcaacattcgcacctagttgtttcaaaccgacaactaagtcaccgataggtcgctccctcattcttggtactccatcaagaacataactgaagttcagaagagagacataaaccatcagtctcaaagcataaccacggaactcatacttattcccataataaggattaaagaaaagaaacatacgttgcatt

SEQ ID NO: 3181 - DNA, 200 bp, Lolium rigidium
ctaggtgcgaatgttgattgtttcctcggcaccgactgcccacctgttcggatcaacggcattggagggctacctggtggcaaggttagcctcatcaacttcccttttatgcgcttttgtacacacatttcagttctctgaaaaaaacaagattatgcgacctttaaaatagccataaccattaggccctatttcgtgta

SEQ ID NO: 3182 - DNA, 200 bp, Lolium rigidium
tacacgaaatagggcctaatggttatggctattttaaaggtcgcataatcttgtttttttcagagaactgaaatgtgtgtacaaaagcgcataaaagggaagttgatgaggctaaccttgccaccaggtagccctccaatgccgttgatccgaacaggtgggcagtcggtgccgaggaaacaatcaacattcgcacctag

SEQ ID NO: 3183 - DNA, 200 bp, Lolium rigidium
taaccattaggccctatttcgtgtaaaacagatatgctgattgtgttgtggtcttagatcacacggcctatcataaattagcacttaacattgaattgcattccacaggttaagctatctggttccatcagcagccagtacttgagttccttgctgatggctgctcctttggctcttggggatgttgagattgaaatcat

SEQ ID NO: 3184 - DNA, 200 bp, Lolium rigidium
atgatttcaatctcaacatccccaagagccaaaggagcagccatcagcaaggaactcaagtactggctgctgatggaaccagatagcttaacctgtggaatgcaattcaatgttaagtgctaatttatgataggccgtgtgatctaagaccacaacacaatcagcatatctgttttacacgaaatagggcctaatggtta

SEQ ID NO: 3185 - DNA, 200 bp, Lolium rigidium
ttggggatgttgagattgaaatcattgataaactaatctctgttccttatgttgaaatgacattgagattgatggagcgttttggcgtgacggcagagcattctgatagctgggacagattctacattaaaggaggacagaagtacaagtaagttttgaattgttctgcttattctaaacatttgtccaaacatttgact

SEQ ID NO: 3186 - DNA, 200 bp, Lolium rigidium
agtcaaatgtttggacaaatgtttagaataagcagaacaattcaaaacttacttgtacttctgtcctcctttaatgtagaatctgtcccagctatcagaatgctctgccgtcacgccaaaacgctccatcaatctcaatgtcatttcaacataaggaacagagattagtttatcaatgatttcaatctcaacatccccaa

SEQ ID NO: 3187 - DNA, 200 bp, Lolium rigidium
taaacatttgtccaaacatttgacttctggataaactagggaattgaacattggaaagaactattgactgctcaacttactgttattagctaagtcaagctttactaggaaatgagtaactctgctacttacaatgcactggctgcacagctatgttttctggtgcataaactattgtctgcccaaataactttaatcat

SEQ ID NO: 3188 - DNA, 200 bp, Lolium rigidium
atgattaaagttatttgggcagacaatagtttatgcaccagaaaacatagctgtgcagccagtgcattgtaagtagcagagttactcatttcctagtaaagcttgacttagctaataacagtaagttgagcagtcaatagttctttccaatgttcaattccctagtttatccagaagtcaaatgtttggacaaatgttta

SEQ ID NO: 3189 - DNA, 200 bp, Lolium rigidium
tgtctgcccaaataactttaatcatctggttaggaccaaacttgtagtagttatgaactgtacaaggaaatcagtgtgacaaatctccgctacttacaatgacattggacggttatattttcttgtgcataaacttggtcacatcagaagtgccatccatctaaaaaagggtgagaattgagaacatatgcagcttaatg

SEQ ID NO: 3190 - DNA, 200 bp, Lolium rigidium
cattaagctgcatatgttctcaattctcacccttttttagatggatggcacttctgatgtgaccaagtttatgcacaagaaaatataaccgtccaatgtcattgtaagtagcggagatttgtcacactgatttccttgtacagttcataactactacaagtttggtcctaaccagatgattaaagttatttgggcagaca

SEQ ID NO: 3191 - DNA, 200 bp, Lolium rigidium
aattgagaacatatgcagcttaatgacagctgtttggcaataagcatttcttttgcggatgattcttgatttgcttcttttagccttttttattgttactagttgaatgtccgtgcttcgccacggctccttagtgtatatttaatggcattcgtgttatacggataaagatactatgtatgtaaatattgaaagtactt

SEQ ID NO: 3192 - DNA, 200 bp, Lolium rigidium
aagtactttcaatatttacatacatagtatctttatccgtataacacgaatgccattaaatatacactaaggagccgtggcgaagcacggacattcaactagtaacaataaaaaaggctaaaagaagcaaatcaagaatcatccgcaaaagaaatgcttattgccaaacagctgtcattaagctgcatatgttctcaatt

SEQ ID NO: 3193 - DNA, 200 bp, Lolium rigidium
atgtatgtaaatattgaaagtactttttttggacccccttccggcatgttctattgtcttcatcgtcgaagccaaatgttacattgggatatctgctgccaaatgttgcagcaggatatgcatcctgattttactgagcatacttcactgatgtaattgaaactgtcagttcaaacttcataaaagttgcagtaatcgct

SEQ ID NO: 3194 - DNA, 200 bp, Lolium rigidium
agcgattactgcaacttttatgaagtttgaactgacagtttcaattacatcagtgaagtatgctcagtaaaatcaggatgcatatcctgctgcaacatttggcagcagatatcccaatgtaacatttggcttcgacgatgaagacaatagaacatgccggaagggggtccaaaaaaagtactttcaatatttacatacat

SEQ ID NO: 3195 - DNA, 200 bp, Lolium rigidium
cttcataaaagttgcagtaatcgcttcctaaacaagccctcccttgctctggaattgacaattgacaggtcccctggaaatgcctatgtcgaaggtgatgcctcaagtgcgagctatttcttggctggcgctgcaatcactggaggaactgtgactgtccaaggttgcggcaccaccagtttgcaggtacaaccagtttt

SEQ ID NO: 3196 - DNA, 200 bp, Lolium rigidium
aaaactggttgtacctgcaaactggtggtgccgcaaccttggacagtcacagttcctccagtgattgcagcgccagccaagaaatagctcgcacttgaggcatcaccttcgacataggcatttccaggggacctgtcaattgtcaattccagagcaagggagggcttgtttaggaagcgattactgcaacttttatgaag

SEQ ID NO: 3197 - DNA, 200 bp, Lolium rigidium
ccagtttgcaggtacaaccagttttaaccatttggttaagcatacttgcggtatataacataatcaaagatatactgctgtcaaccaaactgatttaagtggacattcatttatgaatctatataactacagtactgtaagtcggtttcttgtgctatctccctgacgatgattaatattgcagggtgatgtgaaatttg

SEQ ID NO: 3198 - DNA, 200 bp, Lolium rigidium
caaatttcacatcaccctgcaatattaatcatcgtcagggagatagcacaagaaaccgacttacagtactgtagttatatagattcataaatgaatgtccacttaaatcagtttggttgacagcagtatatctttgattatgttatataccgcaagtatgcttaaccaaatggttaaaactggttgtacctgcaaactgg

SEQ ID NO: 3199 - DNA, 200 bp, Lolium rigidium
atattgcagggtgatgtgaaatttgctgaggtactagaaatgatgggagcgaaagttacatggaccgacactagtgtaactgttactggtccaccacgtcagccctttggaaggaaacacctaaaagctgttgatgtcaacatgaacaaaatgcctgatgttgccatgactcttgccgttgttgccctttttgccgatgg

SEQ ID NO: 3200 - DNA, 200 bp, Lolium rigidium
ccatcggcaaaaagggcaacaacggcaagagtcatggcaacatcaggcattttgttcatgttgacatcaacagcttttaggtgtttccttccaaagggctgacgtggtggaccagtaacagttacactagtgtcggtccatgtaactttcgctcccatcatttctagtacctcagcaaatttcacatcaccctgcaatat

SEQ ID NO: 3201 - DNA, 200 bp, Lolium rigidium
ccgttgttgccctttttgccgatggtccaactgctatcagagatggtaaaccctcttatgtgttgctgttgatttcttttggatggattccgctacagcacatgatttgttcctgacacttgtccattctcctctgtagttgcctcttggagagtgaaggaaaccgagagaatggtggcaatccggacggaactaacaaa

SEQ ID NO: 3202 - DNA, 200 bp, Lolium rigidium
tttgttagttccgtccggattgccaccattctctcggtttccttcactctccaagaggcaactacagaggagaatggacaagtgtcaggaacaaatcatgtgctgtagcggaatccatccaaaagaaatcaacagcaacacataagagggtttaccatctctgatagcagttggaccatcggcaaaaagggcaacaacgg

SEQ ID NO: 3203 - DNA, 200 bp, Lolium rigidium
tggcaatccggacggaactaacaaaggtagcacacctatctccacttcttatatttcagctcactgttgcactccccagtgcttagtctcacctgttgtgtgcctctgtgctatagctgggagcaacggtagaggaaggcccagactactgcattatcacaccaccagagaagctgaacgtcacggcaatcgacacctac

SEQ ID NO: 3204 - DNA, 200 bp, Lolium rigidium
gtaggtgtcgattgccgtgacgttcagcttctctggtggtgtgataatgcagtagtctgggccttcctctaccgttgctcccagctatagcacagaggcacacaacaggtgagactaagcactggggagtgcaacagtgagctgaaatataagaagtggagataggtgtgctacctttgttagttccgtccggattgcca

SEQ ID NO: 3205 - DNA, 200 bp, Lolium rigidium
gaacgtcacggcaatcgacacctacgatgaccaccggatggcgatggccttctccctcgccgcctgcgctgaggtgcctgtcacgatcagggaccctgggtgcacccgcaagaccttccccaactactttgacgtgctaagcaccttcgtgaagaactagctcgatgaaaatctacagtgtatcgcatttgtacttttgt

SEQ ID NO: 3206 - DNA, 200 bp, Lolium rigidium
acaaaagtacaaatgcgatacactgtagattttcatcgagctagttcttcacgaaggtgcttagcacgtcaaagtagttggggaaggtcttgcgggtgcacccagggtccctgatcgtgacaggcacctcagcgcaggcggcgagggagaaggccatcgccatccggtggtcatcgtaggtgtcgattgccgtgacgttc

SEQ ID NO: 3207 - DNA, 200 bp, Lolium rigidium
cagtgtatcgcatttgtacttttgtagcctgtccatggtccgaggaaatttttactgttttggtcttcttgcgaaatgatttatgagtgtaatactagttttgtagcatggcgtggggcttttgaggtaaaatgagttgtatgcatactgagttcgttttgaataagaagcaagttaggagtaccatagaccatactgtg

SEQ ID NO: 3208 - DNA, 200 bp, Lolium rigidium
cacagtatggtctatggtactcctaacttgcttcttattcaaaacgaactcagtatgcatacaactcattttacctcaaaagccccacgccatgctacaaaactagtattacactcataaatcatttcgcaagaagaccaaaacagtaaaaatttcctcggaccatggacaggctacaaaagtacaaatgcgatacactg

SEQ ID NO: 3209 - DNA, 200 bp, Lolium rigidium
taggagtaccatagaccatactgtgacctacatgttcttccgtttccagaggtattatgttggctgctggtactcaagtgtgttcgaaaactactcgacagccatggaatttgggagatgccatttgggtatgtggatgcttgaggaagatcatcaaagcaaacaagaacaccagtcgatggtaaaacagtgcagcttgc

SEQ ID NO: 3210 - DNA, 200 bp, Lolium rigidium
gcaagctgcactgttttaccatcgactggtgttcttgtttgctttgatgatcttcctcaagcatccacatacccaaatggcatctcccaaattccatggctgtcgagtagttttcgaacacacttgagtaccagcagccaacataatacctctggaaacggaagaacatgtaggtcacagtatggtctatggtactccta

SEQ ID NO: 3211 - DNA, 200 bp, Lolium rigidium
tcgatggtaaaacagtgcagcttgcaccaagaatgtttgcctatcagagtaaacaaaccagactcagcagatatgaaaaaaactcagcactgtgacactcgtgctaaaactaatttcatttaggccgtggagtaggccattgcatacttacgtattagagcatctctagtcgagtcctagagcatctctagtcgagtccc

SEQ ID NO: 3212 - DNA, 200 bp, Lolium rigidium
gggactcgactagagatgctctaggactcgactagagatgctctaatacgtaagtatgcaatggcctactccacggcctaaatgaaattagttttagcacgagtgtcacagtgctgagtttttttcatatctgctgagtctggtttgtttactctgataggcaaacattcttggtgcaagctgcactgttttaccatcga

SEQ ID NO: 3213 - DNA, 200 bp, Lolium rigidium
cctagagcatctctagtcgagtccccacaaacggcgccggatcgagcgcttgggggacgagttttgttcgtgccgtgtttggggtacatcgctccctagtcgcgtcccccaaacgccgtccccaatgaggaattcaaaatagtttgtgcatttaaaaaagatggtgttcgtcgaagtcgtcgcgatcaaagtacttggcg

SEQ ID NO: 3214 - DNA, 200 bp, Lolium rigidium
cgccaagtactttgatcgcgacgacttcgacgaacaccatcttttttaaatgcacaaactattttgaattcctcattggggacggcgtttgggggacgcgactagggagcgatgtaccccaaacacggcacgaacaaaactcgtcccccaagcgctcgatccggcgccgtttgtggggactcgactagagatgctctagg

SEQ ID NO: 3215 - DNA, 200 bp, Lolium rigidium
gtcgtcgcgatcaaagtacttggcgcgcgatcatattacaggccgacttgcacaaacatagatcctccagaacggtccacttgggacagtgtgccctacgccttcttcttcttttcctccggaccgggtcctggctcgtacgtcggggagtagaacatagcgttggggttgaagccgtcacgaggcagcgcatcctcgta

SEQ ID NO: 3216 - DNA, 200 bp, Lolium rigidium
tacgaggatgcgctgcctcgtgacggcttcaaccccaacgctatgttctactccccgacgtacgagccaggacccggtccggaggaaaagaagaagaaggcgtagggcacactgtcccaagtggaccgttctggaggatctatgtttgtgcaagtcggcctgtaatatgatcgcgcgccaagtactttgatcgcgacgac

SEQ ID NO: 3217 - DNA, 200 bp, Sorghum halepense
gaggaagtgcagctcttcttggggaatgctggaactgcaatgcggccattgacagcagctgttactgctgctggtggaaatgcaacttacgtgcttgatggagtaccaagaatgagggagagacccattggtgacttggttgtcggattgaagcagcttggtgcggacgttgattgtttccttggcactgactgcccacc

SEQ ID NO: 3218 - DNA, 200 bp, Sorghum halepense
ggtgggcagtcagtgccaaggaaacaatcaacgtccgcaccaagctgcttcaatccgacaaccaagtcaccaatgggtctctccctcattcttggtactccatcaagcacgtaagttgcatttccaccagcagcagtaacagctgctgtcaatggccgcattgcagttccagcattccccaagaagagctgcacttcctc

SEQ ID NO: 3219 - DNA, 200 bp, Sorghum halepense
gtttccttggcactgactgcccacccgttcgtatcaatggaattggagggctacctggcggcaaggttaagctctctggctccatcagcagtcagtacttgagtgccttgctgatggctgctcctttggctcttggggatgtggagattgaaatcattgataaattaatctccattccctatgttgaaatgacattgaga

SEQ ID NO: 3220 - DNA, 200 bp, Sorghum halepense
tctcaatgtcatttcaacatagggaatggagattaatttatcaatgatttcaatctccacatccccaagagccaaaggagcagccatcagcaaggcactcaagtactgactgctgatggagccagagagcttaaccttgccgccaggtagccctccaattccattgatacgaacgggtgggcagtcagtgccaaggaaac

SEQ ID NO: 3221 - DNA, 200 bp, Sorghum halepense
tccctatgttgaaatgacattgagattgatggagcgttttggcgtgaaagcagagcattctgatagctgggacagattctacattaagggaggtcaaaaatacaagtcccccaaaaatgcctatgttgaaggtgatgcctcaagtgcaagctatttcttggctggtgctgcaattactggagggactgtgactgttgaag

SEQ ID NO: 3222 - DNA, 200 bp, Sorghum halepense
cttcaacagtcacagtccctccagtaattgcagcaccagccaagaaatagcttgcacttgaggcatcaccttcaacataggcatttttgggggacttgtatttttgacctcccttaatgtagaatctgtcccagctatcagaatgctctgctttcacgccaaaacgctccatcaatctcaatgtcatttcaacataggga

SEQ ID NO: 3223 - DNA, 21 bp, Unknown
  Found in multiple species
gggttgtggaacaagcagttt

SEQ ID NO: 3224 - DNA, 21 bp, Unknown
  Found in multiple species
agggttgtggaacaagcagtt

SEQ ID NO: 3225 - DNA, 21 bp, Unknown
  Found in multiple species
aactgcttgttccacaaccct

SEQ ID NO: 3226 - DNA, 21 bp, Unknown
  Found in multiple species
aaactgcttgttccacaaccc

SEQ ID NO: 3227 - DNA, 21 bp, Unknown
  Found in multiple species
ttgtggaacaagcagtttaca

SEQ ID NO: 3228 - DNA, 21 bp, Unknown
  Found in multiple species
ttgataaattgatttctgtac

SEQ ID NO: 3229 - DNA, 21 bp, Unknown
  Found in multiple species
ttccagggggcaaggtcaagc

SEQ ID NO: 3230 - DNA, 21 bp, Unknown
  Found in multiple species
tgtggaacaagcagtttacag

SEQ ID NO: 3231 - DNA, 21 bp, Unknown
  Found in multiple species
tgtaaactgcttgttccacaa

SEQ ID NO: 3232 - DNA, 21 bp, Unknown
  Found in multiple species
tggaacaagcagtttacaggg

SEQ ID NO: 3233 - DNA, 21 bp, Unknown
  Found in multiple species
tgataaattgatttctgtacc

SEQ ID NO: 3234 - DNA, 21 bp, Unknown
  Found in multiple species
tccagggggcaaggtcaagct

SEQ ID NO: 3235 - DNA, 21 bp, Unknown
  Found in multiple species
tcactggtgggactgtgactg

SEQ ID NO: 3236 - DNA, 21 bp, Unknown
  Found in multiple species
taaactgcttgttccacaacc

SEQ ID NO: 3237 - DNA, 21 bp, Unknown
  Found in multiple species
gttgtggaacaagcagtttac

SEQ ID NO: 3238 - DNA, 21 bp, Unknown
  Found in multiple species
gtggaacaagcagtttacagg

SEQ ID NO: 3239 - DNA, 21 bp, Unknown
  Found in multiple species
gtgatagttgggacaggttct

SEQ ID NO: 3240 - DNA, 21 bp, Unknown
  Found in multiple species
gtcccaactatcactatgttc

SEQ ID NO: 3241 - DNA, 21 bp, Unknown
  Found in multiple species
gtacagaaatcaatttatcaa

SEQ ID NO: 3242 - DNA, 21 bp, Unknown
  Found in multiple species
gtaaactgcttgttccacaac

SEQ ID NO: 3243 - DNA, 21 bp, Unknown
  Found in multiple species
ggttgtggaacaagcagttta

SEQ ID NO: 3244 - DNA, 21 bp, Unknown
  Found in multiple species
ggtacagaaatcaatttatca

SEQ ID NO: 3245 - DNA, 21 bp, Unknown
  Found in multiple species
ggaacaagcagtttacagggt

SEQ ID NO: 3246 - DNA, 21 bp, Unknown
  Found in multiple species
gcttgaccttgccccctggaa

SEQ ID NO: 3247 - DNA, 21 bp, Unknown
  Found in multiple species
gagcttgaccttgccccctgg

SEQ ID NO: 3248 - DNA, 21 bp, Unknown
  Found in multiple species
gagagcttgaccttgccccct

SEQ ID NO: 3249 - DNA, 21 bp, Unknown
  Found in multiple species
gaacctgtcccaactatcact

SEQ ID NO: 3250 - DNA, 21 bp, Unknown
  Found in multiple species
gaacatagtgatagttgggac

SEQ ID NO: 3251 - DNA, 21 bp, Unknown
  Found in multiple species
gaacaagcagtttacagggtg

SEQ ID NO: 3252 - DNA, 21 bp, Unknown
  Found in multiple species
cttgaccttgccccctggaag

SEQ ID NO: 3253 - DNA, 21 bp, Unknown
  Found in multiple species
cttccagggggcaaggtcaag

SEQ ID NO: 3254 - DNA, 21 bp, Unknown
  Found in multiple species
ctgtaaactgcttgttccaca

SEQ ID NO: 3255 - DNA, 21 bp, Unknown
  Found in multiple species
cctgtaaactgcttgttccac

SEQ ID NO: 3256 - DNA, 21 bp, Unknown
  Found in multiple species
ccctgtaaactgcttgttcca

SEQ ID NO: 3257 - DNA, 21 bp, Unknown
  Found in multiple species
ccagggggcaaggtcaagctc

SEQ ID NO: 3258 - DNA, 21 bp, Unknown
  Found in multiple species
cagtcacagtcccaccagtga

SEQ ID NO: 3259 - DNA, 21 bp, Unknown
  Found in multiple species
cagggggcaaggtcaagctct

SEQ ID NO: 3260 - DNA, 21 bp, Unknown
  Found in multiple species
cactggtgggactgtgactgt

SEQ ID NO: 3261 - DNA, 21 bp, Unknown
  Found in multiple species
caccctgtaaactgcttgttc

SEQ ID NO: 3262 - DNA, 21 bp, Unknown
  Found in multiple species
agtgatagttgggacaggttc

SEQ ID NO: 3263 - DNA, 21 bp, Unknown
  Found in multiple species
agggggcaaggtcaagctctc

SEQ ID NO: 3264 - DNA, 21 bp, Unknown
  Found in multiple species
agcttgaccttgccccctgga

SEQ ID NO: 3265 - DNA, 21 bp, Unknown
  Found in multiple species
agagcttgaccttgccccctg

SEQ ID NO: 3266 - DNA, 21 bp, Unknown
  Found in multiple species
agaacctgtcccaactatcac

SEQ ID NO: 3267 - DNA, 21 bp, Unknown
  Found in multiple species
accctgtaaactgcttgttcc

SEQ ID NO: 3268 - DNA, 21 bp, Unknown
  Found in multiple species
acagtcacagtcccaccagtg

SEQ ID NO: 3269 - DNA, 21 bp, Unknown
  Found in multiple species
tttctgtaccgtatgttgaaa

SEQ ID NO: 3270 - DNA, 21 bp, Unknown
  Found in multiple species
tttcaacatacggtacagaaa

SEQ ID NO: 3271 - DNA, 21 bp, Unknown
  Found in multiple species
tttatcaactatctcaatctc

SEQ ID NO: 3272 - DNA, 21 bp, Unknown
  Found in multiple species
tttaactgcacttctcatggc

SEQ ID NO: 3273 - DNA, 21 bp, Unknown
  Found in multiple species
ttgtcatttcaacatacggta

SEQ ID NO: 3274 - DNA, 21 bp, Unknown
  Found in multiple species
ttggagacgtggagattgaga

SEQ ID NO: 3275 - DNA, 21 bp, Unknown
  Found in multiple species
ttgccccctggaaggcctcct

SEQ ID NO: 3276 - DNA, 21 bp, Unknown
  Found in multiple species
ttgatttctgtaccgtatgtt

SEQ ID NO: 3277 - DNA, 21 bp, Unknown
  Found in multiple species
ttgatggaacgctttggagta

SEQ ID NO: 3278 - DNA, 21 bp, Unknown
  Found in multiple species
ttgagatagttgataaattga

SEQ ID NO: 3279 - DNA, 21 bp, Unknown
  Found in multiple species
ttgaccttgccccctggaagg

SEQ ID NO: 3280 - DNA, 21 bp, Unknown
  Found in multiple species
ttgaaatgacaataaggttga

SEQ ID NO: 3281 - DNA, 21 bp, Unknown
  Found in multiple species
ttctgtaccgtatgttgaaat

SEQ ID NO: 3282 - DNA, 21 bp, Unknown
  Found in multiple species
ttctcatggctactcctttgg

SEQ ID NO: 3283 - DNA, 21 bp, Unknown
  Found in multiple species
ttccatcaaccttattgtcat

SEQ ID NO: 3284 - DNA, 21 bp, Unknown
  Found in multiple species
ttcaacatacggtacagaaat

SEQ ID NO: 3285 - DNA, 21 bp, Unknown
  Found in multiple species
ttattgtcatttcaacatacg

SEQ ID NO: 3286 - DNA, 21 bp, Unknown
  Found in multiple species
ttatcaactatctcaatctcc

SEQ ID NO: 3287 - DNA, 21 bp, Unknown
  Found in multiple species
ttagtagccaatatttaactg

SEQ ID NO: 3288 - DNA, 21 bp, Unknown
  Found in multiple species
ttaactgcacttctcatggct

SEQ ID NO: 3289 - DNA, 21 bp, Unknown
  Found in multiple species
tgttgaaatgacaataaggtt

SEQ ID NO: 3290 - DNA, 21 bp, Unknown
  Found in multiple species
tgtcccaactatcactatgtt

SEQ ID NO: 3291 - DNA, 21 bp, Unknown
  Found in multiple species
tgtcatttcaacatacggtac

SEQ ID NO: 3292 - DNA, 21 bp, Unknown
  Found in multiple species
tgtagaacctgtcccaactat

SEQ ID NO: 3293 - DNA, 21 bp, Unknown
  Found in multiple species
tgtaccgtatgttgaaatgac

SEQ ID NO: 3294 - DNA, 21 bp, Unknown
  Found in multiple species
tggagattgagatagttgata

SEQ ID NO: 3295 - DNA, 21 bp, Unknown
  Found in multiple species
tggagacgtggagattgagat

SEQ ID NO: 3296 - DNA, 21 bp, Unknown
  Found in multiple species
tggaaggcctcctttagcatt

SEQ ID NO: 3297 - DNA, 21 bp, Unknown
  Found in multiple species
tgctaaaggaggccttccagg

SEQ ID NO: 3298 - DNA, 21 bp, Unknown
  Found in multiple species
tgccccctggaaggcctcctt

SEQ ID NO: 3299 - DNA, 21 bp, Unknown
  Found in multiple species
tgcagttaaatattggctact

SEQ ID NO: 3300 - DNA, 21 bp, Unknown
  Found in multiple species
tgcacttctcatggctactcc

SEQ ID NO: 3301 - DNA, 21 bp, Unknown
  Found in multiple species
tgatttctgtaccgtatgttg

SEQ ID NO: 3302 - DNA, 21 bp, Unknown
  Found in multiple species
tgatggaacgctttggagtat

SEQ ID NO: 3303 - DNA, 21 bp, Unknown
  Found in multiple species
tgatagttgggacaggttcta

SEQ ID NO: 3304 - DNA, 21 bp, Unknown
  Found in multiple species
tgagatagttgataaattgat

SEQ ID NO: 3305 - DNA, 21 bp, Unknown
  Found in multiple species
tgagaagtgcagttaaatatt

SEQ ID NO: 3306 - DNA, 21 bp, Unknown
  Found in multiple species
tgaccttgccccctggaaggc

SEQ ID NO: 3307 - DNA, 21 bp, Unknown
  Found in multiple species
tgacaataaggttgatggaac

SEQ ID NO: 3308 - DNA, 21 bp, Unknown
  Found in multiple species
tgaaatgacaataaggttgat

SEQ ID NO: 3309 - DNA, 21 bp, Unknown
  Found in multiple species
tctgtaccgtatgttgaaatg

SEQ ID NO: 3310 - DNA, 21 bp, Unknown
  Found in multiple species
tctcatggctactcctttggg

SEQ ID NO: 3311 - DNA, 21 bp, Unknown
  Found in multiple species
tctcaatctccacgtctccaa

SEQ ID NO: 3312 - DNA, 21 bp, Unknown
  Found in multiple species
tcccaccagtgacggcggctc

SEQ ID NO: 3313 - DNA, 21 bp, Unknown
  Found in multiple species
tccatcaaccttattgtcatt

SEQ ID NO: 3314 - DNA, 21 bp, Unknown
  Found in multiple species
tccagagagcttgaccttgcc

SEQ ID NO: 3315 - DNA, 21 bp, Unknown
  Found in multiple species
tccaaagcgttccatcaacct

SEQ ID NO: 3316 - DNA, 21 bp, Unknown
  Found in multiple species
tcatttcaacatacggtacag

SEQ ID NO: 3317 - DNA, 21 bp, Unknown
  Found in multiple species
tcacagtcccaccagtgacgg

SEQ ID NO: 3318 - DNA, 21 bp, Unknown
  Found in multiple species
tcaatttatcaactatctcaa

SEQ ID NO: 3319 - DNA, 21 bp, Unknown
  Found in multiple species
tcaactatctcaatctccacg

SEQ ID NO: 3320 - DNA, 21 bp, Unknown
  Found in multiple species
tcaaccttattgtcatttcaa

SEQ ID NO: 3321 - DNA, 21 bp, Unknown
  Found in multiple species
tcaacatacggtacagaaatc

SEQ ID NO: 3322 - DNA, 21 bp, Unknown
  Found in multiple species
tatttaactgcacttctcatg

SEQ ID NO: 3323 - DNA, 21 bp, Unknown
  Found in multiple species
tattgtcatttcaacatacgg

SEQ ID NO: 3324 - DNA, 21 bp, Unknown
  Found in multiple species
tatgttgaaatgacaataagg

SEQ ID NO: 3325 - DNA, 21 bp, Unknown
  Found in multiple species
tatctcaatctccacgtctcc

SEQ ID NO: 3326 - DNA, 21 bp, Unknown
  Found in multiple species
tatcaactatctcaatctcca

SEQ ID NO: 3327 - DNA, 21 bp, Unknown
  Found in multiple species
tagttgggacaggttctacat

SEQ ID NO: 3328 - DNA, 21 bp, Unknown
  Found in multiple species
tagttgataaattgatttctg

SEQ ID NO: 3329 - DNA, 21 bp, Unknown
  Found in multiple species
tagtgatagttgggacaggtt

SEQ ID NO: 3330 - DNA, 21 bp, Unknown
  Found in multiple species
tagtagccaatatttaactgc

SEQ ID NO: 3331 - DNA, 21 bp, Unknown
  Found in multiple species
tagccatgagaagtgcagtta

SEQ ID NO: 3332 - DNA, 21 bp, Unknown
  Found in multiple species
tagccaatatttaactgcact

SEQ ID NO: 3333 - DNA, 21 bp, Unknown
  Found in multiple species
tagaacctgtcccaactatca

SEQ ID NO: 3334 - DNA, 21 bp, Unknown
  Found in multiple species
tactccaaagcgttccatcaa

SEQ ID NO: 3335 - DNA, 21 bp, Unknown
  Found in multiple species
tacggtacagaaatcaattta

SEQ ID NO: 3336 - DNA, 21 bp, Unknown
  Found in multiple species
taccgtatgttgaaatgacaa

SEQ ID NO: 3337 - DNA, 21 bp, Unknown
  Found in multiple species
tacagaaatcaatttatcaac

SEQ ID NO: 3338 - DNA, 21 bp, Unknown
  Found in multiple species
taaggttgatggaacgctttg

SEQ ID NO: 3339 - DNA, 21 bp, Unknown
  Found in multiple species
taactgcacttctcatggcta

SEQ ID NO: 3340 - DNA, 21 bp, Unknown
  Found in multiple species
taaattgatttctgtaccgta

SEQ ID NO: 3341 - DNA, 21 bp, Unknown
  Found in multiple species
taaaggaggccttccaggggg

SEQ ID NO: 3342 - DNA, 21 bp, Unknown
  Found in multiple species
gttgatggaacgctttggagt

SEQ ID NO: 3343 - DNA, 21 bp, Unknown
  Found in multiple species
gttgataaattgatttctgta

SEQ ID NO: 3344 - DNA, 21 bp, Unknown
  Found in multiple species
gttgaaatgacaataaggttg

SEQ ID NO: 3345 - DNA, 21 bp, Unknown
  Found in multiple species
gttccatcaaccttattgtca

SEQ ID NO: 3346 - DNA, 21 bp, Unknown
  Found in multiple species
gttagtagccaatatttaact

SEQ ID NO: 3347 - DNA, 21 bp, Unknown
  Found in multiple species
gtggagattgagatagttgat

SEQ ID NO: 3348 - DNA, 21 bp, Unknown
  Found in multiple species
gtgcagttaaatattggctac

SEQ ID NO: 3349 - DNA, 21 bp, Unknown
  Found in multiple species
gtcccaccagtgacggcggct

SEQ ID NO: 3350 - DNA, 21 bp, Unknown
  Found in multiple species
gtcatttcaacatacggtaca

SEQ ID NO: 3351 - DNA, 21 bp, Unknown
  Found in multiple species
gtcactggtgggactgtgact

SEQ ID NO: 3352 - DNA, 21 bp, Unknown
  Found in multiple species
gtcacagtcccaccagtgacg

SEQ ID NO: 3353 - DNA, 21 bp, Unknown
  Found in multiple species
gtatgttgaaatgacaataag

SEQ ID NO: 3354 - DNA, 21 bp, Unknown
  Found in multiple species
gtagccatgagaagtgcagtt

SEQ ID NO: 3355 - DNA, 21 bp, Unknown
  Found in multiple species
gtagccaatatttaactgcac

SEQ ID NO: 3356 - DNA, 21 bp, Unknown
  Found in multiple species
gtagaacctgtcccaactatc

SEQ ID NO: 3357 - DNA, 21 bp, Unknown
  Found in multiple species
gtaccgtatgttgaaatgaca

SEQ ID NO: 3358 - DNA, 21 bp, Unknown
  Found in multiple species
ggttgatggaacgctttggag

SEQ ID NO: 3359 - DNA, 21 bp, Unknown
  Found in multiple species
gggggcaaggtcaagctctct

SEQ ID NO: 3360 - DNA, 21 bp, Unknown
  Found in multiple species
ggggcaaggtcaagctctctg

SEQ ID NO: 3361 - DNA, 21 bp, Unknown
  Found in multiple species
gggcaaggtcaagctctctgg

SEQ ID NO: 3362 - DNA, 21 bp, Unknown
  Found in multiple species
ggccttccagggggcaaggtc

SEQ ID NO: 3363 - DNA, 21 bp, Unknown
  Found in multiple species
ggcaaggtcaagctctctgga

SEQ ID NO: 3364 - DNA, 21 bp, Unknown
  Found in multiple species
ggagtagccatgagaagtgca

SEQ ID NO: 3365 - DNA, 21 bp, Unknown
  Found in multiple species
ggaggccttccagggggcaag

SEQ ID NO: 3366 - DNA, 21 bp, Unknown
  Found in multiple species
ggagccgccgtcactggtggg

SEQ ID NO: 3367 - DNA, 21 bp, Unknown
  Found in multiple species
ggagattgagatagttgataa

SEQ ID NO: 3368 - DNA, 21 bp, Unknown
  Found in multiple species
ggagacgtggagattgagata

SEQ ID NO: 3369 - DNA, 21 bp, Unknown
  Found in multiple species
gctaaaggaggccttccaggg

SEQ ID NO: 3370 - DNA, 21 bp, Unknown
  Found in multiple species
gcgttccatcaaccttattgt

SEQ ID NO: 3371 - DNA, 21 bp, Unknown
  Found in multiple species
gccttccagggggcaaggtca

SEQ ID NO: 3372 - DNA, 21 bp, Unknown
  Found in multiple species
gccgtcactggtgggactgtg

SEQ ID NO: 3373 - DNA, 21 bp, Unknown
  Found in multiple species
gccgccgtcactggtgggact

SEQ ID NO: 3374 - DNA, 21 bp, Unknown
  Found in multiple species
gccccctggaaggcctccttt

SEQ ID NO: 3375 - DNA, 21 bp, Unknown
  Found in multiple species
gccatgagaagtgcagttaaa

SEQ ID NO: 3376 - DNA, 21 bp, Unknown
  Found in multiple species
gccaatatttaactgcacttc

SEQ ID NO: 3377 - DNA, 21 bp, Unknown
  Found in multiple species
gcagttaaatattggctacta

SEQ ID NO: 3378 - DNA, 21 bp, Unknown
  Found in multiple species
gcacttctcatggctactcct

SEQ ID NO: 3379 - DNA, 21 bp, Unknown
  Found in multiple species
gcaaggtcaagctctctggat

SEQ ID NO: 3380 - DNA, 21 bp, Unknown
  Found in multiple species
gatttctgtaccgtatgttga

SEQ ID NO: 3381 - DNA, 21 bp, Unknown
  Found in multiple species
gattgagatagttgataaatt

SEQ ID NO: 3382 - DNA, 21 bp, Unknown
  Found in multiple species
gatggaacgctttggagtatc

SEQ ID NO: 3383 - DNA, 21 bp, Unknown
  Found in multiple species
gatccagagagcttgaccttg

SEQ ID NO: 3384 - DNA, 21 bp, Unknown
  Found in multiple species
gatagttgggacaggttctac

SEQ ID NO: 3385 - DNA, 21 bp, Unknown
  Found in multiple species
gatagttgataaattgatttc

SEQ ID NO: 3386 - DNA, 21 bp, Unknown
  Found in multiple species
gatactccaaagcgttccatc

SEQ ID NO: 3387 - DNA, 21 bp, Unknown
  Found in multiple species
gataaattgatttctgtaccg

SEQ ID NO: 3388 - DNA, 21 bp, Unknown
  Found in multiple species
gagtagccatgagaagtgcag

SEQ ID NO: 3389 - DNA, 21 bp, Unknown
  Found in multiple species
gaggccttccagggggcaagg

SEQ ID NO: 3390 - DNA, 21 bp, Unknown
  Found in multiple species
gagccgccgtcactggtggga

SEQ ID NO: 3391 - DNA, 21 bp, Unknown
  Found in multiple species
gagattgagatagttgataaa

SEQ ID NO: 3392 - DNA, 21 bp, Unknown
  Found in multiple species
gagatagttgataaattgatt

SEQ ID NO: 3393 - DNA, 21 bp, Unknown
  Found in multiple species
gagacgtggagattgagatag

SEQ ID NO: 3394 - DNA, 21 bp, Unknown
  Found in multiple species
gagaagtgcagttaaatattg

SEQ ID NO: 3395 - DNA, 21 bp, Unknown
  Found in multiple species
gacgtggagattgagatagtt

SEQ ID NO: 3396 - DNA, 21 bp, Unknown
  Found in multiple species
gaccttgccccctggaaggcc

SEQ ID NO: 3397 - DNA, 21 bp, Unknown
  Found in multiple species
gacaataaggttgatggaacg

SEQ ID NO: 3398 - DNA, 21 bp, Unknown
  Found in multiple species
gaagtgcagttaaatattggc

SEQ ID NO: 3399 - DNA, 21 bp, Unknown
  Found in multiple species
gaaatgacaataaggttgatg

SEQ ID NO: 3400 - DNA, 21 bp, Unknown
  Found in multiple species
gaaatcaatttatcaactatc

SEQ ID NO: 3401 - DNA, 21 bp, Unknown
  Found in multiple species
cttgccccctggaaggcctcc

SEQ ID NO: 3402 - DNA, 21 bp, Unknown
  Found in multiple species
cttctcatggctactcctttg

SEQ ID NO: 3403 - DNA, 21 bp, Unknown
  Found in multiple species
cttattgtcatttcaacatac

SEQ ID NO: 3404 - DNA, 21 bp, Unknown
  Found in multiple species
ctgtcccaactatcactatgt

SEQ ID NO: 3405 - DNA, 21 bp, Unknown
  Found in multiple species
ctgtaccgtatgttgaaatga

SEQ ID NO: 3406 - DNA, 21 bp, Unknown
  Found in multiple species
ctggaaggcctcctttagcat

SEQ ID NO: 3407 - DNA, 21 bp, Unknown
  Found in multiple species
ctgcacttctcatggctactc

SEQ ID NO: 3408 - DNA, 21 bp, Unknown
  Found in multiple species
ctccaaagcgttccatcaacc

SEQ ID NO: 3409 - DNA, 21 bp, Unknown
  Found in multiple species
ctatctcaatctccacgtctc

SEQ ID NO: 3410 - DNA, 21 bp, Unknown
  Found in multiple species
ctaaaggaggccttccagggg

SEQ ID NO: 3411 - DNA, 21 bp, Unknown
  Found in multiple species
cgttccatcaaccttattgtc

SEQ ID NO: 3412 - DNA, 21 bp, Unknown
  Found in multiple species
cgtggagattgagatagttga

SEQ ID NO: 3413 - DNA, 21 bp, Unknown
  Found in multiple species
cgtcactggtgggactgtgac

SEQ ID NO: 3414 - DNA, 21 bp, Unknown
  Found in multiple species
cgtatgttgaaatgacaataa

SEQ ID NO: 3415 - DNA, 21 bp, Unknown
  Found in multiple species
cggtacagaaatcaatttatc

SEQ ID NO: 3416 - DNA, 21 bp, Unknown
  Found in multiple species
cgccgtcactggtgggactgt

SEQ ID NO: 3417 - DNA, 21 bp, Unknown
  Found in multiple species
ccttgccccctggaaggcctc

SEQ ID NO: 3418 - DNA, 21 bp, Unknown
  Found in multiple species
ccttccagggggcaaggtcaa

SEQ ID NO: 3419 - DNA, 21 bp, Unknown
  Found in multiple species
ccttattgtcatttcaacata

SEQ ID NO: 3420 - DNA, 21 bp, Unknown
  Found in multiple species
cctgtcccaactatcactatg

SEQ ID NO: 3421 - DNA, 21 bp, Unknown
  Found in multiple species
cctggaaggcctcctttagca

SEQ ID NO: 3422 - DNA, 21 bp, Unknown
  Found in multiple species
ccgtcactggtgggactgtga

SEQ ID NO: 3423 - DNA, 21 bp, Unknown
  Found in multiple species
ccgtatgttgaaatgacaata

SEQ ID NO: 3424 - DNA, 21 bp, Unknown
  Found in multiple species
ccgccgtcactggtgggactg

SEQ ID NO: 3425 - DNA, 21 bp, Unknown
  Found in multiple species
ccctggaaggcctcctttagc

SEQ ID NO: 3426 - DNA, 21 bp, Unknown
  Found in multiple species
cccctggaaggcctcctttag

SEQ ID NO: 3427 - DNA, 21 bp, Unknown
  Found in multiple species
ccccctggaaggcctccttta

SEQ ID NO: 3428 - DNA, 21 bp, Unknown
  Found in multiple species
cccaccagtgacggcggctcc

SEQ ID NO: 3429 - DNA, 21 bp, Unknown
  Found in multiple species
cccaaaggagtagccatgaga

SEQ ID NO: 3430 - DNA, 21 bp, Unknown
  Found in multiple species
ccatgagaagtgcagttaaat

SEQ ID NO: 3431 - DNA, 21 bp, Unknown
  Found in multiple species
ccatcaaccttattgtcattt

SEQ ID NO: 3432 - DNA, 21 bp, Unknown
  Found in multiple species
ccagagagcttgaccttgccc

SEQ ID NO: 3433 - DNA, 21 bp, Unknown
  Found in multiple species
ccaatatttaactgcacttct

SEQ ID NO: 3434 - DNA, 21 bp, Unknown
  Found in multiple species
ccaaaggagtagccatgagaa

SEQ ID NO: 3435 - DNA, 21 bp, Unknown
  Found in multiple species
ccaaagcgttccatcaacctt

SEQ ID NO: 3436 - DNA, 21 bp, Unknown
  Found in multiple species
catttcaacatacggtacaga

SEQ ID NO: 3437 - DNA, 21 bp, Unknown
  Found in multiple species
catgagaagtgcagttaaata

SEQ ID NO: 3438 - DNA, 21 bp, Unknown
  Found in multiple species
catcaaccttattgtcatttc

SEQ ID NO: 3439 - DNA, 21 bp, Unknown
  Found in multiple species
catagtgatagttgggacagg

SEQ ID NO: 3440 - DNA, 21 bp, Unknown
  Found in multiple species
catacggtacagaaatcaatt

SEQ ID NO: 3441 - DNA, 21 bp, Unknown
  Found in multiple species
cagttaaatattggctactaa

SEQ ID NO: 3442 - DNA, 21 bp, Unknown
  Found in multiple species
cagtcccaccagtgacggcgg

SEQ ID NO: 3443 - DNA, 21 bp, Unknown
  Found in multiple species
cagagagcttgaccttgcccc

SEQ ID NO: 3444 - DNA, 21 bp, Unknown
  Found in multiple species
cagaaatcaatttatcaacta

SEQ ID NO: 3445 - DNA, 21 bp, Unknown
  Found in multiple species
cacttctcatggctactcctt

SEQ ID NO: 3446 - DNA, 21 bp, Unknown
  Found in multiple species
cacagtcccaccagtgacggc

SEQ ID NO: 3447 - DNA, 21 bp, Unknown
  Found in multiple species
caatttatcaactatctcaat

SEQ ID NO: 3448 - DNA, 21 bp, Unknown
  Found in multiple species
caatatttaactgcacttctc

SEQ ID NO: 3449 - DNA, 21 bp, Unknown
  Found in multiple species
caataaggttgatggaacgct

SEQ ID NO: 3450 - DNA, 21 bp, Unknown
  Found in multiple species
caaggtcaagctctctggatc

SEQ ID NO: 3451 - DNA, 21 bp, Unknown
  Found in multiple species
caactatctcaatctccacgt

SEQ ID NO: 3452 - DNA, 21 bp, Unknown
  Found in multiple species
caaccttattgtcatttcaac

SEQ ID NO: 3453 - DNA, 21 bp, Unknown
  Found in multiple species
caacatacggtacagaaatca

SEQ ID NO: 3454 - DNA, 21 bp, Unknown
  Found in multiple species
caaaggagtagccatgagaag

SEQ ID NO: 3455 - DNA, 21 bp, Unknown
  Found in multiple species
caaagcgttccatcaacctta

SEQ ID NO: 3456 - DNA, 21 bp, Unknown
  Found in multiple species
atttctgtaccgtatgttgaa

SEQ ID NO: 3457 - DNA, 21 bp, Unknown
  Found in multiple species
atttcaacatacggtacagaa

SEQ ID NO: 3458 - DNA, 21 bp, Unknown
  Found in multiple species
atttatcaactatctcaatct

SEQ ID NO: 3459 - DNA, 21 bp, Unknown
  Found in multiple species
atttaactgcacttctcatgg

SEQ ID NO: 3460 - DNA, 21 bp, Unknown
  Found in multiple species
attgtcatttcaacatacggt

SEQ ID NO: 3461 - DNA, 21 bp, Unknown
  Found in multiple species
attgatttctgtaccgtatgt

SEQ ID NO: 3462 - DNA, 21 bp, Unknown
  Found in multiple species
attgagatagttgataaattg

SEQ ID NO: 3463 - DNA, 21 bp, Unknown
  Found in multiple species
atgttgaaatgacaataaggt

SEQ ID NO: 3464 - DNA, 21 bp, Unknown
  Found in multiple species
atgtagaacctgtcccaacta

SEQ ID NO: 3465 - DNA, 21 bp, Unknown
  Found in multiple species
atgctaaaggaggccttccag

SEQ ID NO: 3466 - DNA, 21 bp, Unknown
  Found in multiple species
atgagaagtgcagttaaatat

SEQ ID NO: 3467 - DNA, 21 bp, Unknown
  Found in multiple species
atgacaataaggttgatggaa

SEQ ID NO: 3468 - DNA, 21 bp, Unknown
  Found in multiple species
atctcaatctccacgtctcca

SEQ ID NO: 3469 - DNA, 21 bp, Unknown
  Found in multiple species
atccagagagcttgaccttgc

SEQ ID NO: 3470 - DNA, 21 bp, Unknown
  Found in multiple species
atcaatttatcaactatctca

SEQ ID NO: 3471 - DNA, 21 bp, Unknown
  Found in multiple species
atcaactatctcaatctccac

SEQ ID NO: 3472 - DNA, 21 bp, Unknown
  Found in multiple species
atcaaccttattgtcatttca

SEQ ID NO: 3473 - DNA, 21 bp, Unknown
  Found in multiple species
atatttaactgcacttctcat

SEQ ID NO: 3474 - DNA, 21 bp, Unknown
  Found in multiple species
atagttgggacaggttctaca

SEQ ID NO: 3475 - DNA, 21 bp, Unknown
  Found in multiple species
atagttgataaattgatttct

SEQ ID NO: 3476 - DNA, 21 bp, Unknown
  Found in multiple species
atagtgatagttgggacaggt

SEQ ID NO: 3477 - DNA, 21 bp, Unknown
  Found in multiple species
atactccaaagcgttccatca

SEQ ID NO: 3478 - DNA, 21 bp, Unknown
  Found in multiple species
atacggtacagaaatcaattt

SEQ ID NO: 3479 - DNA, 21 bp, Unknown
  Found in multiple species
ataaggttgatggaacgcttt

SEQ ID NO: 3480 - DNA, 21 bp, Unknown
  Found in multiple species
ataaattgatttctgtaccgt

SEQ ID NO: 3481 - DNA, 21 bp, Unknown
  Found in multiple species
agttgataaattgatttctgt

SEQ ID NO: 3482 - DNA, 21 bp, Unknown
  Found in multiple species
agttaaatattggctactaac

SEQ ID NO: 3483 - DNA, 21 bp, Unknown
  Found in multiple species
agtgcagttaaatattggcta

SEQ ID NO: 3484 - DNA, 21 bp, Unknown
  Found in multiple species
agtcccaccagtgacggcggc

SEQ ID NO: 3485 - DNA, 21 bp, Unknown
  Found in multiple species
agtcacagtcccaccagtgac

SEQ ID NO: 3486 - DNA, 21 bp, Unknown
  Found in multiple species
agtagccatgagaagtgcagt

SEQ ID NO: 3487 - DNA, 21 bp, Unknown
  Found in multiple species
agtagccaatatttaactgca

SEQ ID NO: 3488 - DNA, 21 bp, Unknown
  Found in multiple species
aggttgatggaacgctttgga

SEQ ID NO: 3489 - DNA, 21 bp, Unknown
  Found in multiple species
aggccttccagggggcaaggt

SEQ ID NO: 3490 - DNA, 21 bp, Unknown
  Found in multiple species
aggagtagccatgagaagtgc

SEQ ID NO: 3491 - DNA, 21 bp, Unknown
  Found in multiple species
aggaggccttccagggggcaa

SEQ ID NO: 3492 - DNA, 21 bp, Unknown
  Found in multiple species
agcgttccatcaaccttattg

SEQ ID NO: 3493 - DNA, 21 bp, Unknown
  Found in multiple species
agccgccgtcactggtgggac

SEQ ID NO: 3494 - DNA, 21 bp, Unknown
  Found in multiple species
agccatgagaagtgcagttaa

SEQ ID NO: 3495 - DNA, 21 bp, Unknown
  Found in multiple species
agccaatatttaactgcactt

SEQ ID NO: 3496 - DNA, 21 bp, Unknown
  Found in multiple species
agattgagatagttgataaat

SEQ ID NO: 3497 - DNA, 21 bp, Unknown
  Found in multiple species
agatagttgataaattgattt

SEQ ID NO: 3498 - DNA, 21 bp, Unknown
  Found in multiple species
agagagcttgaccttgccccc

SEQ ID NO: 3499 - DNA, 21 bp, Unknown
  Found in multiple species
agacgtggagattgagatagt

SEQ ID NO: 3500 - DNA, 21 bp, Unknown
  Found in multiple species
agaagtgcagttaaatattgg

SEQ ID NO: 3501 - DNA, 21 bp, Unknown
  Found in multiple species
agaaatcaatttatcaactat

SEQ ID NO: 3502 - DNA, 21 bp, Unknown
  Found in multiple species
acttctcatggctactccttt

SEQ ID NO: 3503 - DNA, 21 bp, Unknown
  Found in multiple species
actgcttgttccacaaccctt

SEQ ID NO: 3504 - DNA, 21 bp, Unknown
  Found in multiple species
actgcacttctcatggctact

SEQ ID NO: 3505 - DNA, 21 bp, Unknown
  Found in multiple species
actccaaagcgttccatcaac

SEQ ID NO: 3506 - DNA, 21 bp, Unknown
  Found in multiple species
actatctcaatctccacgtct

SEQ ID NO: 3507 - DNA, 21 bp, Unknown
  Found in multiple species
acgtggagattgagatagttg

SEQ ID NO: 3508 - DNA, 21 bp, Unknown
  Found in multiple species
acggtacagaaatcaatttat

SEQ ID NO: 3509 - DNA, 21 bp, Unknown
  Found in multiple species
accttgccccctggaaggcct

SEQ ID NO: 3510 - DNA, 21 bp, Unknown
  Found in multiple species
accttattgtcatttcaacat

SEQ ID NO: 3511 - DNA, 21 bp, Unknown
  Found in multiple species
acctgtcccaactatcactat

SEQ ID NO: 3512 - DNA, 21 bp, Unknown
  Found in multiple species
accgtatgttgaaatgacaat

SEQ ID NO: 3513 - DNA, 21 bp, Unknown
  Found in multiple species
acatagtgatagttgggacag

SEQ ID NO: 3514 - DNA, 21 bp, Unknown
  Found in multiple species
acatacggtacagaaatcaat

SEQ ID NO: 3515 - DNA, 21 bp, Unknown
  Found in multiple species
acagtcccaccagtgacggcg

SEQ ID NO: 3516 - DNA, 21 bp, Unknown
  Found in multiple species
acagaaatcaatttatcaact

SEQ ID NO: 3517 - DNA, 21 bp, Unknown
  Found in multiple species
acaataaggttgatggaacgc

SEQ ID NO: 3518 - DNA, 21 bp, Unknown
  Found in multiple species
aatttatcaactatctcaatc

SEQ ID NO: 3519 - DNA, 21 bp, Unknown
  Found in multiple species
aattgatttctgtaccgtatg

SEQ ID NO: 3520 - DNA, 21 bp, Unknown
  Found in multiple species
aatgctaaaggaggccttcca

SEQ ID NO: 3521 - DNA, 21 bp, Unknown
  Found in multiple species
aatgacaataaggttgatgga

SEQ ID NO: 3522 - DNA, 21 bp, Unknown
  Found in multiple species
aatcaatttatcaactatctc

SEQ ID NO: 3523 - DNA, 21 bp, Unknown
  Found in multiple species
aatatttaactgcacttctca

SEQ ID NO: 3524 - DNA, 21 bp, Unknown
  Found in multiple species
aataaggttgatggaacgctt

SEQ ID NO: 3525 - DNA, 21 bp, Unknown
  Found in multiple species
aagtgcagttaaatattggct

SEQ ID NO: 3526 - DNA, 21 bp, Unknown
  Found in multiple species
aaggttgatggaacgctttgg

SEQ ID NO: 3527 - DNA, 21 bp, Unknown
  Found in multiple species
aagggttgtggaacaagcagt

SEQ ID NO: 3528 - DNA, 21 bp, Unknown
  Found in multiple species
aaggagtagccatgagaagtg

SEQ ID NO: 3529 - DNA, 21 bp, Unknown
  Found in multiple species
aaggaggccttccagggggca

SEQ ID NO: 3530 - DNA, 21 bp, Unknown
  Found in multiple species
aagcgttccatcaaccttatt

SEQ ID NO: 3531 - DNA, 21 bp, Unknown
  Found in multiple species
aactgcacttctcatggctac

SEQ ID NO: 3532 - DNA, 21 bp, Unknown
  Found in multiple species
aactatctcaatctccacgtc

SEQ ID NO: 3533 - DNA, 21 bp, Unknown
  Found in multiple species
aaccttattgtcatttcaaca

SEQ ID NO: 3534 - DNA, 21 bp, Unknown
  Found in multiple species
aacctgtcccaactatcacta

SEQ ID NO: 3535 - DNA, 21 bp, Unknown
  Found in multiple species
aacatagtgatagttgggaca

SEQ ID NO: 3536 - DNA, 21 bp, Unknown
  Found in multiple species
aacatacggtacagaaatcaa

SEQ ID NO: 3537 - DNA, 21 bp, Unknown
  Found in multiple species
aaattgatttctgtaccgtat

SEQ ID NO: 3538 - DNA, 21 bp, Unknown
  Found in multiple species
aaatgacaataaggttgatgg

SEQ ID NO: 3539 - DNA, 21 bp, Unknown
  Found in multiple species
aaatcaatttatcaactatct

SEQ ID NO: 3540 - DNA, 21 bp, Unknown
  Found in multiple species
aaaggagtagccatgagaagt

SEQ ID NO: 3541 - DNA, 21 bp, Unknown
  Found in multiple species
aaaggaggccttccagggggc

SEQ ID NO: 3542 - DNA, 21 bp, Unknown
  Found in multiple species
aaagcgttccatcaaccttat

SEQ ID NO: 3543 - DNA, 1302 bp, Amaranthus palmeri
atttggataactttttcctttgattcgaatcggattatttttaatacagtattatgaactgatttaatgaaagtggaggaagtttcaatttttaaagttgtaggtgtaatgttttctcattttggatatgaaagtggaggaagtttcaatttcgaatcatgtttgccagttgattcaatgaatgctcttggaaatgaccaagagttcaaggcttcttgttataaaacatttcaattttgatctaagaatgaactatttagaacttaaagtaattaaattattagttataacttataaaaaaattcaattttaaccttaaatttataaattatgaccttaaaaagatcaagtattgaacgcatatttagaaaaattataattcggcttatcagtctcatattgagacggtctcgtccaagacaagttgtatcatttatataatcaaatataattatgagtgtattcatgtaggtttcaactttaaagcctaggtgaaagatatgttgtagcatctttgtgaaagtcagcctataacttggttctaaaattttgaagcataaccatatagtccctcgaattcattcaagttgtccaatttacttttttatacttgccgagacaacatttaaacccttaatatttctaattaatcttaattaaaaattatgaaaatttgatattaataatctttgtattgaaacgaatttaacaagatctcacatgactatgttttaacttatagattaaaaaaaaatacaaattaagagtgataagtgaatagtgccccaaaacaaatgggacaacttagatgaattggaggtaatattaggtagcaagtgatcactttaacatcaaaattgatcacttataggttcaaattgaaacttttactttaattgatatgtttaaatactactttaaattgaaattgatatttttaaggtcaaaattgaaacctttaagattataattgaaaattggcagaagaaaaacaaagagaaagaatataagacacgcaaattgtaccgatctactcttatttcaatttgagacggtctcgcccaagactagatgttcggtcatcctacaccaaccccaaaaaattcaacaacaaagtcttataatgattccctctaatctactacagtctacaccaacccactttctctttgcccaccaaaactttggtttggtaagaactaagccctcttctttcccttctctctctcttaaaagcctgaaaaatccacctaacttttttttaagccaacaaacaacgccaaattcagagaaagaataatg

SEQ ID NO: 3544 - DNA, 21 bp, Amaranthus palmeri
gtcatagcaacatctggcatt

SEQ ID NO: 3545 - DNA, 21 bp, Amaranthus palmeri
gtcatagcaacatctggcatt

SEQ ID NO: 3546 - DNA, 21 bp, Amaranthus palmeri
aatgccagatgttgctatgac

SEQ ID NO: 3547 - DNA, 21 bp, Amaranthus palmeri
gtcatagcaacatctggcatt

SEQ ID NO: 3548 - DNA, 21 bp, Artificial sequence
  artificial sequence
gtcatagcaacatctggcatt

SEQ ID NO: 3549 - DNA, 21 bp, Artificial sequence
  artificial sequence
gtcatagcaacatctggcatt

SEQ ID NO: 3550 - DNA, 20 bp, Artificial sequence
  artificial sequence
tcatagcaacatctggcatt

SEQ ID NO: 3551 - DNA, 19 bp, Amaranthus palmeri
catagcaacatctggcatt

SEQ ID NO: 3552 - DNA, 18 bp, Amaranthus palmeri
atagcaacatctggcatt

SEQ ID NO: 3553 - DNA, 21 bp, Artificial sequence
  artificial sequence
gtcatagcaacatctggcata

SEQ ID NO: 3554 - DNA, 21 bp, Artificial sequence
  artificial sequence
gtcatagcaacatctggcaaa

SEQ ID NO: 3555 - DNA, 21 bp, Artificial sequence
  artificial sequence
gtcatagcaagatctggcatt

SEQ ID NO: 3556 - DNA, 21 bp, Artificial sequence
  artificial sequence
gtcatagcatgttctggcatt

SEQ ID NO: 3557 - DNA, 21 bp, Artificial sequence
  artificial sequence
gtcaatgcaacatctggcatt

SEQ ID NO: 3558 - DNA, 21 bp, Artificial sequence
  artificial sequence
gtcatagcaacatctcccatt

SEQ ID NO: 3559 - DNA, 22 bp, Artificial sequence
  artificial sequence
gtcatagcaacatctggcattc

SEQ ID NO: 3560 - DNA, 22 bp, Artificial sequence
  artificial sequence
gtcatagcaacatctggcattt

SEQ ID NO: 3561 - DNA, 25 bp, Artificial sequence
  artificial sequence
ctctttgtttttcttctgccaattt

SEQ ID NO: 3562 - DNA, 24 bp, Artificial sequence
  artificial sequence
ctctttgtttttcttctgccaatt

SEQ ID NO: 3563 - DNA, 23 bp, Artificial sequence
  artificial sequence
ctctttgtttttcttctgccaat

SEQ ID NO: 3564 - DNA, 22 bp, Artificial sequence
  artificial sequence
ctctttgtttttcttctgccaa

SEQ ID NO: 3565 - DNA, 21 bp, Artificial sequence
  artificial sequence
ctctttgtttttcttctgcca

SEQ ID NO: 3566 - DNA, 20 bp, Artificial sequence
  artificial sequence
ctctttgtttttcttctgcc

SEQ ID NO: 3567 - DNA, 19 bp, Artificial sequence
  artificial sequence
ctctttgtttttcttctgc

SEQ ID NO: 3568 - DNA, 18 bp, Artificial sequence
  artificial sequence
ctctttgtttttcttctg

SEQ ID NO: 3569 - DNA, 17 bp, Artificial sequence
  artificial sequence
ctctttgtttttcttct

SEQ ID NO: 3570 - DNA, 24 bp, Artificial sequence
  artificial sequence
tctttgtttttcttctgccaattt

SEQ ID NO: 3571 - DNA, 23 bp, Artificial sequence
  artificial sequence
ctttgtttttcttctgccaattt

SEQ ID NO: 3572 - DNA, 22 bp, Artificial sequence
  artificial sequence
tttgtttttcttctgccaattt

SEQ ID NO: 3573 - DNA, 21 bp, Artificial sequence
  artificial sequence
ttgtttttcttctgccaattt

SEQ ID NO: 3574 - DNA, 20 bp, Artificial sequence
  artificial sequence
ttgtttttcttctgccaatt

SEQ ID NO: 3575 - DNA, 19 bp, Artificial sequence
  artificial sequence
ttgtttttcttctgccaat

SEQ ID NO: 3576 - DNA, 18 bp, Artificial sequence
  artificial sequence
ttgtttttcttctgccaa

SEQ ID NO: 3577 - DNA, 17 bp, Artificial sequence
  artificial sequence
ttgtttttcttctgcca

SEQ ID NO: 3578 - DNA, 25 bp, Artificial sequence
  artificial sequence
gtctttgtttttcttctgccaattt

SEQ ID NO: 3579 - DNA, 25 bp, Artificial sequence
  artificial sequence
gactttgtttttcttctgccaattt

SEQ ID NO: 3580 - DNA, 25 bp, Artificial sequence
  artificial sequence
ctctttgtttttgttctgccaattt

SEQ ID NO: 3581 - DNA, 25 bp, Artificial sequence
  artificial sequence
ctctttgttttagatctgccaattt

SEQ ID NO: 3582 - DNA, 25 bp, Artificial sequence
  artificial sequence
ctctttcaatttcttctgccaattt

SEQ ID NO: 3583 - DNA, 25 bp, Artificial sequence
  artificial sequence
ctctttgtttttcttcacgcaattt

SEQ ID NO: 3584 - DNA, 25 bp, Artificial sequence
  artificial sequence
ctctttgtttttcttctgccaatta

SEQ ID NO: 3585 - DNA, 25 bp, Artificial sequence
  artificial sequence
ctctttgtttttcttctgccaataa

SEQ ID NO: 3586 - DNA, 26 bp, Artificial sequence
  artificial sequence
ctctttgtttttcttctgccaatttc

SEQ ID NO: 3587 - DNA, 26 bp, Artificial sequence
  artificial sequence
ctctttgtttttcttctgccaatttt

SEQ ID NO: 3588 - DNA, 25 bp, Amaranthus palmeri
cgaatcaaaggaaaaagttatccaa

SEQ ID NO: 3589 - DNA, 25 bp, Amaranthus palmeri
aataatccgattcgaatcaaaggaa

SEQ ID NO: 3590 - DNA, 25 bp, Amaranthus palmeri
tactgtattaaaaataatccgattc

SEQ ID NO: 3591 - DNA, 25 bp, Amaranthus palmeri
atcagttcataatactgtattaaaa

SEQ ID NO: 3592 - DNA, 25 bp, Amaranthus palmeri
cactttcattaaatcagttcataat

SEQ ID NO: 3593 - DNA, 25 bp, Amaranthus palmeri
tgaaacttcctccactttcattaaa

SEQ ID NO: 3594 - DNA, 25 bp, Amaranthus palmeri
aactttaaaaattgaaacttcctcc

SEQ ID NO: 3595 - DNA, 25 bp, Amaranthus palmeri
cattacacctacaactttaaaaatt

SEQ ID NO: 3596 - DNA, 25 bp, Amaranthus palmeri
aaaatgagaaaacattacacctaca

SEQ ID NO: 3597 - DNA, 25 bp, Amaranthus palmeri
actttcatatccaaaatgagaaaac

SEQ ID NO: 3598 - DNA, 25 bp, Amaranthus palmeri
gaaacttcctccactttcatatcca

SEQ ID NO: 3599 - DNA, 25 bp, Amaranthus palmeri
tgattcgaaattgaaacttcctcca

SEQ ID NO: 3600 - DNA, 25 bp, Amaranthus palmeri
aactggcaaacatgattcgaaattg

SEQ ID NO: 3601 - DNA, 25 bp, Amaranthus palmeri
attcattgaatcaactggcaaacat

SEQ ID NO: 3602 - DNA, 25 bp, Amaranthus palmeri
atttccaagagcattcattgaatca

SEQ ID NO: 3603 - DNA, 25 bp, Amaranthus palmeri
gaactcttggtcatttccaagagca

SEQ ID NO: 3604 - DNA, 25 bp, Amaranthus palmeri
acaagaagccttgaactcttggtca

SEQ ID NO: 3605 - DNA, 25 bp, Amaranthus palmeri
aaatgttttataacaagaagccttg

SEQ ID NO: 3606 - DNA, 25 bp, Amaranthus palmeri
agatcaaaattgaaatgttttataa

SEQ ID NO: 3607 - DNA, 25 bp, Amaranthus palmeri
tagttcattcttagatcaaaattga

SEQ ID NO: 3608 - DNA, 25 bp, Amaranthus palmeri
ttaagttctaaatagttcattctta

SEQ ID NO: 3609 - DNA, 25 bp, Amaranthus palmeri
aatttaattactttaagttctaaat

SEQ ID NO: 3610 - DNA, 25 bp, Amaranthus palmeri
gttataactaataatttaattactt

SEQ ID NO: 3611 - DNA, 25 bp, Amaranthus palmeri
atttttttataagttataactaata

SEQ ID NO: 3612 - DNA, 25 bp, Amaranthus palmeri
ggttaaaattgaatttttttataag

SEQ ID NO: 3613 - DNA, 25 bp, Amaranthus palmeri
ttataaatttaaggttaaaattgaa

SEQ ID NO: 3614 - DNA, 25 bp, Amaranthus palmeri
taaggtcataatttataaatttaag

SEQ ID NO: 3615 - DNA, 25 bp, Amaranthus palmeri
acttgatctttttaaggtcataatt

SEQ ID NO: 3616 - DNA, 25 bp, Amaranthus palmeri
tatgcgttcaatacttgatcttttt

SEQ ID NO: 3617 - DNA, 25 bp, Amaranthus palmeri
aatttttctaaatatgcgttcaata

SEQ ID NO: 3618 - DNA, 25 bp, Amaranthus palmeri
aagccgaattataatttttctaaat

SEQ ID NO: 3619 - DNA, 25 bp, Amaranthus palmeri
tatgagactgataagccgaattata

SEQ ID NO: 3620 - DNA, 25 bp, Amaranthus palmeri
agaccgtctcaatatgagactgata

SEQ ID NO: 3621 - DNA, 25 bp, Amaranthus palmeri
ttgtcttggacgagaccgtctcaat

SEQ ID NO: 3622 - DNA, 25 bp, Amaranthus palmeri
aaatgatacaacttgtcttggacga

SEQ ID NO: 3623 - DNA, 25 bp, Amaranthus palmeri
atttgattatataaatgatacaact

SEQ ID NO: 3624 - DNA, 25 bp, Amaranthus palmeri
actcataattatatttgattatata

SEQ ID NO: 3625 - DNA, 25 bp, Amaranthus palmeri
ctacatgaatacactcataattata

SEQ ID NO: 3626 - DNA, 25 bp, Amaranthus palmeri
taaagttgaaacctacatgaataca

SEQ ID NO: 3627 - DNA, 25 bp, Amaranthus palmeri
tcacctaggctttaaagttgaaacc

SEQ ID NO: 3628 - DNA, 25 bp, Amaranthus palmeri
acaacatatctttcacctaggcttt

SEQ ID NO: 3629 - DNA, 25 bp, Amaranthus palmeri
cacaaagatgctacaacatatcttt

SEQ ID NO: 3630 - DNA, 25 bp, Amaranthus palmeri
taggctgactttcacaaagatgcta

SEQ ID NO: 3631 - DNA, 25 bp, Amaranthus palmeri
agaaccaagttataggctgactttc

SEQ ID NO: 3632 - DNA, 25 bp, Amaranthus palmeri
cttcaaaattttagaaccaagttat

SEQ ID NO: 3633 - DNA, 25 bp, Amaranthus palmeri
tatatggttatgcttcaaaatttta

SEQ ID NO: 3634 - DNA, 25 bp, Amaranthus palmeri
aattcgagggactatatggttatgc

SEQ ID NO: 3635 - DNA, 25 bp, Amaranthus palmeri
acaacttgaatgaattcgagggact

SEQ ID NO: 3636 - DNA, 25 bp, Amaranthus palmeri
aaagtaaattggacaacttgaatga

SEQ ID NO: 3637 - DNA, 25 bp, Amaranthus palmeri
ggcaagtataaaaaagtaaattgga

SEQ ID NO: 3638 - DNA, 25 bp, Amaranthus palmeri
aaatgttgtctcggcaagtataaaa

SEQ ID NO: 3639 - DNA, 25 bp, Amaranthus palmeri
attaagggtttaaaatgttgtctcg

SEQ ID NO: 3640 - DNA, 25 bp, Amaranthus palmeri
ttaattagaaatattaagggtttaa

SEQ ID NO: 3641 - DNA, 25 bp, Amaranthus palmeri
ttttaattaagattaattagaaata

SEQ ID NO: 3642 - DNA, 25 bp, Amaranthus palmeri
aattttcataatttttaattaagat

SEQ ID NO: 3643 - DNA, 25 bp, Amaranthus palmeri
ttattaatatcaaattttcataatt

SEQ ID NO: 3644 - DNA, 25 bp, Amaranthus palmeri
tcaatacaaagattattaatatcaa

SEQ ID NO: 3645 - DNA, 25 bp, Amaranthus palmeri
gttaaattcgtttcaatacaaagat

SEQ ID NO: 3646 - DNA, 25 bp, Amaranthus palmeri
atgtgagatcttgttaaattcgttt

SEQ ID NO: 3647 - DNA, 25 bp, Amaranthus palmeri
taaaacatagtcatgtgagatcttg

SEQ ID NO: 3648 - DNA, 25 bp, Amaranthus palmeri
taatctataagttaaaacatagtca

SEQ ID NO: 3649 - DNA, 25 bp, Amaranthus palmeri
ttgtattttttttaatctataagtt

SEQ ID NO: 3650 - DNA, 25 bp, Amaranthus palmeri
atcactcttaatttgtatttttttt

SEQ ID NO: 3651 - DNA, 25 bp, Amaranthus palmeri
cactattcacttatcactcttaatt

SEQ ID NO: 3652 - DNA, 25 bp, Amaranthus palmeri
tttgttttggggcactattcactta

SEQ ID NO: 3653 - DNA, 25 bp, Amaranthus palmeri
taagttgtcccatttgttttggggc

SEQ ID NO: 3654 - DNA, 25 bp, Amaranthus palmeri
ctccaattcatctaagttgtcccat

SEQ ID NO: 3655 - DNA, 25 bp, Amaranthus palmeri
acctaatattacctccaattcatct

SEQ ID NO: 3656 - DNA, 25 bp, Amaranthus palmeri
agatcacttgctacctaatattacc

SEQ ID NO: 3657 - DNA, 25 bp, Amaranthus palmeri
tgatcacttgctagatcacttgcta

SEQ ID NO: 3658 - DNA, 25 bp, Amaranthus palmeri
ttgatgttaaagtgatcacttgcta

SEQ ID NO: 3659 - DNA, 25 bp, Amaranthus palmeri
aagtgatcaattttgatgttaaagt

SEQ ID NO: 3660 - DNA, 25 bp, Amaranthus palmeri
atttgaacctataagtgatcaattt

SEQ ID NO: 3661 - DNA, 25 bp, Amaranthus palmeri
gtaaaagtttcaatttgaacctata

SEQ ID NO: 3662 - DNA, 25 bp, Amaranthus palmeri
atatcaattaaagtaaaagtttcaa

SEQ ID NO: 3663 - DNA, 25 bp, Amaranthus palmeri
tagtatttaaacatatcaattaaag

SEQ ID NO: 3664 - DNA, 25 bp, Amaranthus palmeri
ttcaatttaaagtagtatttaaaca

SEQ ID NO: 3665 - DNA, 25 bp, Amaranthus palmeri
aaaaatatcaatttcaatttaaagt

SEQ ID NO: 3666 - DNA, 25 bp, Amaranthus palmeri
aattttgaccttaaaaatatcaatt

SEQ ID NO: 3667 - DNA, 25 bp, Amaranthus palmeri
cttaaaggtttcaattttgacctta

SEQ ID NO: 3668 - DNA, 25 bp, Amaranthus palmeri
ttcaattataatcttaaaggtttca

SEQ ID NO: 3669 - DNA, 25 bp, Amaranthus palmeri
cttctgccaattttcaattataatc

SEQ ID NO: 3670 - DNA, 25 bp, Amaranthus palmeri
ctctttgtttttcttctgccaattt

SEQ ID NO: 3671 - DNA, 25 bp, Amaranthus palmeri
cttatattctttctctttgtttttc

SEQ ID NO: 3672 - DNA, 25 bp, Amaranthus palmeri
caatttgcgtgtcttatattctttc

SEQ ID NO: 3673 - DNA, 25 bp, Amaranthus palmeri
agtagatcggtacaatttgcgtgtc

SEQ ID NO: 3674 - DNA, 25 bp, Amaranthus palmeri
aattgaaataagagtagatcggtac

SEQ ID NO: 3675 - DNA, 25 bp, Amaranthus palmeri
agaccgtctcaaaattgaaataaga

SEQ ID NO: 3676 - DNA, 25 bp, Amaranthus palmeri
tagtcttgggcgagaccgtctcaaa

SEQ ID NO: 3677 - DNA, 25 bp, Amaranthus palmeri
tgaccgaacatctagtcttgggcga

SEQ ID NO: 3678 - DNA, 25 bp, Amaranthus palmeri
gttggtgtaggatgaccgaacatct

SEQ ID NO: 3679 - DNA, 25 bp, Amaranthus palmeri
gaattttttggggttggtgtaggat

SEQ ID NO: 3680 - DNA, 25 bp, Amaranthus palmeri
gactttgttgttgaattttttgggg

SEQ ID NO: 3681 - DNA, 25 bp, Amaranthus palmeri
gaatcattataagactttgttgttg

SEQ ID NO: 3682 - DNA, 25 bp, Amaranthus palmeri
gtagattagagggaatcattataag

SEQ ID NO: 3683 - DNA, 25 bp, Amaranthus palmeri
gtgtagactgtagtagattagaggg

SEQ ID NO: 3684 - DNA, 25 bp, Amaranthus palmeri
cgaatcaaaggaaaaagttatccaa

SEQ ID NO: 3685 - DNA, 25 bp, Amaranthus palmeri
aactttaaaaattgaaacttcctcc

SEQ ID NO: 3686 - DNA, 25 bp, Amaranthus palmeri
aataatccgattcgaatcaaaggaa

SEQ ID NO: 3687 - DNA, 25 bp, Amaranthus palmeri
cattacacctacaactttaaaaatt

SEQ ID NO: 3688 - DNA, 25 bp, Amaranthus palmeri
tactgtattaaaaataatccgattc

SEQ ID NO: 3689 - DNA, 25 bp, Amaranthus palmeri
aaaatgagaaaacattacacctaca

SEQ ID NO: 3690 - DNA, 25 bp, Amaranthus palmeri
atcagttcataatactgtattaaaa

SEQ ID NO: 3691 - DNA, 25 bp, Amaranthus palmeri
actttcatatccaaaatgagaaaac

SEQ ID NO: 3692 - DNA, 25 bp, Amaranthus palmeri
cactttcattaaatcagttcataat

SEQ ID NO: 3693 - DNA, 25 bp, Amaranthus palmeri
gaaacttcctccactttcatatcca

SEQ ID NO: 3694 - DNA, 25 bp, Amaranthus palmeri
tgaaacttcctccactttcattaaa

SEQ ID NO: 3695 - DNA, 25 bp, Amaranthus palmeri
tgattcgaaattgaaacttcctcca

SEQ ID NO: 3696 - DNA, 25 bp, Amaranthus palmeri
aactggcaaacatgattcgaaattg

SEQ ID NO: 3697 - DNA, 25 bp, Amaranthus palmeri
agatcaaaattgaaatgttttataa

SEQ ID NO: 3698 - DNA, 25 bp, Amaranthus palmeri
attcattgaatcaactggcaaacat

SEQ ID NO: 3699 - DNA, 25 bp, Amaranthus palmeri
tagttcattcttagatcaaaattga

SEQ ID NO: 3700 - DNA, 25 bp, Amaranthus palmeri
atttccaagagcattcattgaatca

SEQ ID NO: 3701 - DNA, 25 bp, Amaranthus palmeri
ttaagttctaaatagttcattctta

SEQ ID NO: 3702 - DNA, 25 bp, Amaranthus palmeri
gaactcttggtcatttccaagagca

SEQ ID NO: 3703 - DNA, 25 bp, Amaranthus palmeri
aatttaattactttaagttctaaat

SEQ ID NO: 3704 - DNA, 25 bp, Amaranthus palmeri
acaagaagccttgaactcttggtca

SEQ ID NO: 3705 - DNA, 25 bp, Amaranthus palmeri
gttataactaataatttaattactt

SEQ ID NO: 3706 - DNA, 25 bp, Amaranthus palmeri
aaatgttttataacaagaagccttg

SEQ ID NO: 3707 - DNA, 25 bp, Amaranthus palmeri
atttttttataagttataactaata

SEQ ID NO: 3708 - DNA, 25 bp, Amaranthus palmeri
ggttaaaattgaatttttttataag

SEQ ID NO: 3709 - DNA, 25 bp, Amaranthus palmeri
aagccgaattataatttttctaaat

SEQ ID NO: 3710 - DNA, 25 bp, Amaranthus palmeri
ttataaatttaaggttaaaattgaa

SEQ ID NO: 3711 - DNA, 25 bp, Amaranthus palmeri
tatgagactgataagccgaattata

SEQ ID NO: 3712 - DNA, 25 bp, Amaranthus palmeri
taaggtcataatttataaatttaag

SEQ ID NO: 3713 - DNA, 25 bp, Amaranthus palmeri
agaccgtctcaatatgagactgata

SEQ ID NO: 3714 - DNA, 25 bp, Amaranthus palmeri
acttgatctttttaaggtcataatt

SEQ ID NO: 3715 - DNA, 25 bp, Amaranthus palmeri
ttgtcttggacgagaccgtctcaat

SEQ ID NO: 3716 - DNA, 25 bp, Amaranthus palmeri
tatgcgttcaatacttgatcttttt

SEQ ID NO: 3717 - DNA, 25 bp, Amaranthus palmeri
aaatgatacaacttgtcttggacga

SEQ ID NO: 3718 - DNA, 25 bp, Amaranthus palmeri
aatttttctaaatatgcgttcaata

SEQ ID NO: 3719 - DNA, 25 bp, Amaranthus palmeri
atttgattatataaatgatacaact

SEQ ID NO: 3720 - DNA, 25 bp, Amaranthus palmeri
actcataattatatttgattatata

SEQ ID NO: 3721 - DNA, 25 bp, Amaranthus palmeri
taggctgactttcacaaagatgcta

SEQ ID NO: 3722 - DNA, 25 bp, Amaranthus palmeri
ctacatgaatacactcataattata

SEQ ID NO: 3723 - DNA, 25 bp, Amaranthus palmeri
agaaccaagttataggctgactttc

SEQ ID NO: 3724 - DNA, 25 bp, Amaranthus palmeri
taaagttgaaacctacatgaataca

SEQ ID NO: 3725 - DNA, 25 bp, Amaranthus palmeri
cttcaaaattttagaaccaagttat

SEQ ID NO: 3726 - DNA, 25 bp, Amaranthus palmeri
tcacctaggctttaaagttgaaacc

SEQ ID NO: 3727 - DNA, 25 bp, Amaranthus palmeri
tatatggttatgcttcaaaatttta

SEQ ID NO: 3728 - DNA, 25 bp, Amaranthus palmeri
acaacatatctttcacctaggcttt

SEQ ID NO: 3729 - DNA, 25 bp, Amaranthus palmeri
aattcgagggactatatggttatgc

SEQ ID NO: 3730 - DNA, 25 bp, Amaranthus palmeri
cacaaagatgctacaacatatcttt

SEQ ID NO: 3731 - DNA, 25 bp, Amaranthus palmeri
acaacttgaatgaattcgagggact

SEQ ID NO: 3732 - DNA, 25 bp, Amaranthus palmeri
aaagtaaattggacaacttgaatga

SEQ ID NO: 3733 - DNA, 25 bp, Amaranthus palmeri
aattttcataatttttaattaagat

SEQ ID NO: 3734 - DNA, 25 bp, Amaranthus palmeri
ggcaagtataaaaaagtaaattgga

SEQ ID NO: 3735 - DNA, 25 bp, Amaranthus palmeri
ttattaatatcaaattttcataatt

SEQ ID NO: 3736 - DNA, 25 bp, Amaranthus palmeri
aaatgttgtctcggcaagtataaaa

SEQ ID NO: 3737 - DNA, 25 bp, Amaranthus palmeri
tcaatacaaagattattaatatcaa

SEQ ID NO: 3738 - DNA, 25 bp, Amaranthus palmeri
attaagggtttaaaatgttgtctcg

SEQ ID NO: 3739 - DNA, 25 bp, Amaranthus palmeri
gttaaattcgtttcaatacaaagat

SEQ ID NO: 3740 - DNA, 25 bp, Amaranthus palmeri
ttaattagaaatattaagggtttaa

SEQ ID NO: 3741 - DNA, 25 bp, Amaranthus palmeri
atgtgagatcttgttaaattcgttt

SEQ ID NO: 3742 - DNA, 25 bp, Amaranthus palmeri
ttttaattaagattaattagaaata

SEQ ID NO: 3743 - DNA, 25 bp, Amaranthus palmeri
taaaacatagtcatgtgagatcttg

SEQ ID NO: 3744 - DNA, 25 bp, Amaranthus palmeri
taatctataagttaaaacatagtca

SEQ ID NO: 3745 - DNA, 25 bp, Amaranthus palmeri
ctccaattcatctaagttgtcccat

SEQ ID NO: 3746 - DNA, 25 bp, Amaranthus palmeri
ttgtattttttttaatctataagtt

SEQ ID NO: 3747 - DNA, 25 bp, Amaranthus palmeri
acctaatattacctccaattcatct

SEQ ID NO: 3748 - DNA, 25 bp, Amaranthus palmeri
atcactcttaatttgtatttttttt

SEQ ID NO: 3749 - DNA, 25 bp, Amaranthus palmeri
agatcacttgctacctaatattacc

SEQ ID NO: 3750 - DNA, 25 bp, Amaranthus palmeri
cactattcacttatcactcttaatt

SEQ ID NO: 3751 - DNA, 25 bp, Amaranthus palmeri
tgatcacttgctagatcacttgcta

SEQ ID NO: 3752 - DNA, 25 bp, Amaranthus palmeri
tttgttttggggcactattcactta

SEQ ID NO: 3753 - DNA, 25 bp, Amaranthus palmeri
ttgatgttaaagtgatcacttgcta

SEQ ID NO: 3754 - DNA, 25 bp, Amaranthus palmeri
taagttgtcccatttgttttggggc

SEQ ID NO: 3755 - DNA, 25 bp, Amaranthus palmeri
aagtgatcaattttgatgttaaagt

SEQ ID NO: 3756 - DNA, 25 bp, Amaranthus palmeri
atttgaacctataagtgatcaattt

SEQ ID NO: 3757 - DNA, 25 bp, Amaranthus palmeri
aattttgaccttaaaaatatcaatt

SEQ ID NO: 3758 - DNA, 25 bp, Amaranthus palmeri
gtaaaagtttcaatttgaacctata

SEQ ID NO: 3759 - DNA, 25 bp, Amaranthus palmeri
cttaaaggtttcaattttgacctta

SEQ ID NO: 3760 - DNA, 25 bp, Amaranthus palmeri
atatcaattaaagtaaaagtttcaa

SEQ ID NO: 3761 - DNA, 25 bp, Amaranthus palmeri
ttcaattataatcttaaaggtttca

SEQ ID NO: 3762 - DNA, 25 bp, Amaranthus palmeri
tagtatttaaacatatcaattaaag

SEQ ID NO: 3763 - DNA, 25 bp, Amaranthus palmeri
cttctgccaattttcaattataatc

SEQ ID NO: 3764 - DNA, 25 bp, Amaranthus palmeri
ttcaatttaaagtagtatttaaaca

SEQ ID NO: 3765 - DNA, 25 bp, Amaranthus palmeri
ctctttgtttttcttctgccaattt

SEQ ID NO: 3766 - DNA, 25 bp, Amaranthus palmeri
aaaaatatcaatttcaatttaaagt

SEQ ID NO: 3767 - DNA, 25 bp, Amaranthus palmeri
cttatattctttctctttgtttttc

SEQ ID NO: 3768 - DNA, 25 bp, Amaranthus palmeri
caatttgcgtgtcttatattctttc

SEQ ID NO: 3769 - DNA, 25 bp, Amaranthus palmeri
gttggtgtaggatgaccgaacatct

SEQ ID NO: 3770 - DNA, 25 bp, Amaranthus palmeri
agtagatcggtacaatttgcgtgtc

SEQ ID NO: 3771 - DNA, 25 bp, Amaranthus palmeri
gaattttttggggttggtgtaggat

SEQ ID NO: 3772 - DNA, 25 bp, Amaranthus palmeri
aattgaaataagagtagatcggtac

SEQ ID NO: 3773 - DNA, 25 bp, Amaranthus palmeri
gactttgttgttgaattttttgggg

SEQ ID NO: 3774 - DNA, 25 bp, Amaranthus palmeri
agaccgtctcaaaattgaaataaga

SEQ ID NO: 3775 - DNA, 25 bp, Amaranthus palmeri
gaatcattataagactttgttgttg

SEQ ID NO: 3776 - DNA, 25 bp, Amaranthus palmeri
tagtcttgggcgagaccgtctcaaa

SEQ ID NO: 3777 - DNA, 25 bp, Amaranthus palmeri
gtagattagagggaatcattataag

SEQ ID NO: 3778 - DNA, 25 bp, Amaranthus palmeri
tgaccgaacatctagtcttgggcga

SEQ ID NO: 3779 - DNA, 25 bp, Amaranthus palmeri
gtgtagactgtagtagattagaggg

SEQ ID NO: 3780 - DNA, 25 bp, Amaranthus palmeri
gcacaaatgtaaataaaccgtctcc

SEQ ID NO: 3781 - DNA, 25 bp, Amaranthus palmeri
atcatcactatacagcaagttgtcg

SEQ ID NO: 3782 - DNA, 25 bp, Amaranthus palmeri
tctcttcctttccatctttaccaac

SEQ ID NO: 3783 - DNA, 25 bp, Amaranthus palmeri
tgtgccaagaaaacaatctacatct

SEQ ID NO: 3784 - DNA, 25 bp, Amaranthus palmeri
ggctactaaccgatccagagagctt

SEQ ID NO: 3785 - DNA, 25 bp, Amaranthus palmeri
accctctacgactgcccttttggct

SEQ ID NO: 3786 - DNA, 25 bp, Amaranthus palmeri
ccttttggctgtactatcatcctcc

SEQ ID NO: 3787 - DNA, 152 bp, Amaranthus palmeri
cgacaacttgctgtatagtgatgatattctttatatgttggacgctctcagaactcttggtttaaaagtggaggatgatagtacagccaaaagggcagtcgtagagggttgtggtggtctgtttcctgttggtaaagatggaaaggaagaga

SEQ ID NO: 3788 - DNA, 104 bp, Amaranthus palmeri
agatgtagattgttttcttggcacaaattgccctcctgttcgggtcaatgctaaaggaggccttccagggggcaaggtcaagctctctggatcggttagtagcc

SEQ ID NO: 3789 - RNA, 25 nt, Amaranthus palmeri
cucuuuguuuuucuucugccaauuu

We claim:

1. A method of plant control comprising: treating a plant with a composition comprising a polynucleotide and a transfer agent, wherein said polynucleotide is essentially identical or essentially complementary to a portion of an EPSPS gene sequence or fragment thereof, or to a portion of an RNA transcript of said EPSPS gene sequence or fragment thereof, wherein said EPSPS gene sequence is selected from the group consisting of SEQ ID NO:1-120 or a polynucleotide fragment thereof, whereby said plant growth or development or reproductive ability is reduced or said plant is more sensitive to an EPSPS inhibitor herbicide relative to a plant not treated with said composition.

2. The method as claimed in claim 1, wherein said transfer agent is an organosilicone surfactant composition or compound contained therein.

3. The method as claimed in claim 1, wherein said polynucleotide fragment is 19 contiguous nucleotides, 20 contiguous nucleotides or at least 21 contiguous nucleotides in length and at least 85 percent identical to an EPSPS gene sequence selected from the group consisting of SEQ ID NO:1-120.

4. The method as claimed in claim 3, wherein said polynucleotide fragment is selected from the group consisting of sense or anti-sense ssDNA or ssRNA, dsRNA, or dsDNA, or dsDNA/RNA hybrids.

5. The method as claimed in claim 1, wherein said plant is selected from the group consisting of Amaranthus palmeri, Amaranthus rudis, Amaranthus graecizans, Amaranthus hybridus, Amaranthus lividus, Amaranthus spinosus, Amaranthus thunbergii, Amaranthus viridis, Lolium multiflorum, Lolium rigidium, Ambrosia artemisiifolia, Ambrosia trifida, Euphorbia heterophylla, Kochia scoparia, Abutilon theophrasti, Sorghum halepense, Chenopodium album, Commelina diffusa, Conyza candensis, Digitaria sanguinalis.

6. The method as claimed in claim 1, wherein said composition further comprises said EPSPS inhibitor herbicide and external application to a plant with said composition.

7. The method as claimed in claim 6, wherein said composition further comprises one or more herbicides different from said EPSPS inhibitor herbicide.

8. The method as claimed in claim 7, wherein said composition further comprises an auxin-like herbicide.

9. The method as claimed in claim 8, wherein said auxin-like herbicide is dicamba or 2,4-D.

10. The method as claimed in claim 3, wherein said composition comprises any combination of two or more of said polynucleotide fragments and external application to a plant with said composition.

11. A composition comprising a polynucleotide and a transfer agent, wherein said polynucleotide is essentially identical or essentially complementary to an EPSPS gene sequence or fragment thereof, or to an RNA transcript of said EPSPS gene sequence, wherein said EPSPS gene sequence is selected from the group consisting of SEQ ID NO:1-120 or a polynucleotide fragment thereof, and whereby a plant treated with said composition has its growth or development or reproductive ability regulated, suppressed or delayed or said plant is more sensitive to an EPSPS inhibitor herbicide as a result of said polynucleotide containing composition relative to a plant not treated with said composition.

12. The composition of claim 11, wherein said transfer agent is an organosilicone composition.

13. The composition of claim 11, wherein said polynucleotide fragment is 19 contiguous nucleotides, 20 contiguous nucleotides or at least 21 contiguous nucleotides in length and at least 85 percent identical to an EPSPS gene sequence selected from the group consisting of SEQ ID NO:1-120.

14. The composition of claim 11, wherein said polynucleotide is selected from the group consisting of SEQ ID NO:121-3222.

15. The composition of claim 11, wherein said polynucleotide is selected from the group consisting of SEQ ID NO:3223-3542.

16. The composition of claim 11, further comprising an EPSPS inhibitor herbicide.

17. The composition of claim 16, wherein said EPSPS inhibitor molecule is glyphosate.

18. The composition of claim 17, further comprising a co-herbicide.

19. The composition of claim 18, wherein said co-herbicide is an auxin-like herbicide.

20. The method as claimed in claim 8, wherein said auxin-like herbicide is dicamba or 2,4-D.

21. A method of reducing expression of an EPSPS gene in a plant comprising: external application to a plant of a composition comprising a polynucleotide and a transfer agent, wherein said polynucleotide is essentially identical or essentially complementary to an EPSPS gene sequence, or to the RNA transcript of said EPSPS gene sequence, wherein said EPSPS gene sequence is selected from the group consisting of SEQ ID NO:1-120 or a polynucleotide fragment thereof, whereby said expression of said EPSPS gene is reduced relative to a plant in which the composition was not applied.

22. The method as claimed in claim 21, wherein said transfer agent is an organosilicone compound.

23. The method as claimed in claim 21, wherein said polynucleotide fragment is 19 contiguous nucleotides, 20 contiguous nucleotides or at least 21 contiguous nucleotides in length and at least 85 percent identical to an EPSPS gene sequence selected from the group consisting of SEQ ID NO:1-120.

24. The method as claimed in 21, wherein said polynucleotide molecule is selected from the group consisting of sense or anti-sense ssDNA or ssRNA, dsRNA, or dsDNA, or dsDNA/RNA hybrids.

25. A microbial expression cassette comprising a polynucleotide fragment of 19 contiguous nucleotides, 20 contiguous nucleotides or at least 21 contiguous nucleotides in length and at least 85 percent identical to an EPSPS gene sequence selected from the group consisting of SEQ ID NO:1-120.

26. A method of making a polynucleotide comprising a) transforming the microbial expression cassette of claim 25 into a microbe; b) growing said microbe; c) harvesting a polynucleotide from said microbe, wherein said polynucleotide is 19 contiguous nucleotides, 20 contiguous nucleotides or at least 21 contiguous nucleotides in length and at least 85 percent identical to an EPSPS gene sequence selected from the group consisting of SEQ ID NO:1-120.

27. A method of identifying polynucleotides useful in modulating EPSPS gene expression when externally treating a plant comprising: a) providing a plurality of polynucleotides that comprise a region essentially identical or essentially complementary to a polynucleotide fragment of 19 contiguous nucleotides, 20 contiguous nucleotides or at least 21 contiguous nucleotides in length and at least 85 percent identical to an EPSPS gene sequence selected from the group consisting of SEQ ID NO:1-120; b) externally treating said plant with one or more of said polynucleotides and a transfer agent; c) analyzing said plant or extract for modulation of EPSPS gene expression, and whereby a plant treated with said composition has its growth or development or reproductive ability regulated, suppressed or delayed or said plant is more sensitive to an EPSPS inhibitor herbicide as a result of said polynucleotide containing composition relative to a plant not treated with said composition.

28. The method as claimed in 27, wherein said plant is selected from the group consisting of Amaranthus palmeri, Amaranthus rudis, Amaranthus graecizans, Amaranthus hybridus, Amaranthus lividus, Amaranthus spinosus, Amaranthus thunbergii, Amaranthus viridis, Lolium multiflorum, Lolium rigidium, Ambrosia artemisiifolia, Ambrosia trifida, Euphorbia heterophylla, Kochia scoparia, Abutilon theophrasti, Sorghum halepense, Chenopodium album, Commelina diffusa, Conyza candensis, Digitaria sanguinalis.

29. The method as claimed in 27, wherein said EPSPS gene expression is reduced relative to a plant not treated with said polynucleotide fragment and a transfer agent.

30. The method as claimed in 27, wherein said transfer agent is an organosilicone compound.

31. An agricultural chemical composition comprising an admixture of a polynucleotide and a glyphosate herbicide and a co-herbicide, wherein said polynucleotide is essentially identical or essentially complementary to a portion of an EPSPS gene sequence or fragment thereof, or to a portion of an RNA transcript of said EPSPS gene sequence or fragment thereof, wherein said EPSPS gene sequence is selected from the group consisting of SEQ ID NO:1-120 or a polynucleotide fragment thereof, and whereby a plant treated with said composition has its growth or development or reproductive ability regulated, suppressed or delayed or said plant is more sensitive to an EPSPS inhibitor herbicide as a result of said polynucleotide containing composition relative to a plant not treated with said composition.

32. The agricultural chemical composition of claim 31, wherein said co-herbicide is selected from the group consisting of amide herbicides, arsenical herbicides, benzothiazole herbicides, benzoylcyclohexanedione herbicides, benzofuranyl alkylsulfonate herbicides, carbamate herbicides, cyclohexene oxime herbicides, cyclopropylisoxazole herbicides, dicarboximide herbicides, dinitroaniline herbicides, dinitrophenol herbicides, diphenyl ether herbicides, dithiocarbamate herbicides, halogenated aliphatic herbicides, imidazolinone herbicides, inorganic herbicides, nitrile herbicides, organophosphorus herbicides, oxadiazolone herbicides, oxazole herbicides, phenoxy herbicides, phenylenediamine herbicides, pyrazole herbicides, pyridazine herbicides, pyridazinone herbicides, pyridine herbicides, pyrimidinediamine herbicides, pyrimidinyloxybenzylamine herbicides, quaternary ammonium herbicides, thiocarbamate herbicides, thiocarbonate herbicides, thiourea herbicides, triazine herbicides, triazinone herbicides, triazole herbicides, triazolone herbicides, triazolopyrimidine herbicides, uracil herbicides, and urea herbicides.

33. An agricultural chemical composition comprising an admixture of a polynucleotide and a glyphosate herbicide and a pesticide, wherein said polynucleotide is essentially identical or essentially complementary to a portion of an EPSPS gene sequence, or to a portion of an RNA transcript of said EPSPS gene sequence, wherein said EPSPS gene sequence is selected from the group consisting of SEQ ID NO:1-120 or a polynucleotide fragment thereof, and whereby a plant treated with said composition has its growth or development or reproductive ability regulated, suppressed or delayed or said plant is more sensitive to an EPSPS inhibitor herbicide as a result of said polynucleotide containing composition relative to a plant not treated with said composition.

34. The agricultural chemical composition of claim 33, wherein said pesticide is selected from the group consisting of insecticides, fungicides, nematocides, bactericides, acaricides, growth regulators, chemosterilants, semiochemicals, repellents, attractants, pheromones, feeding stimulants, and biopesticides.

35. A polynucleotide molecule applied to the surface of a plant that enhances said plant sensitivity to a glyphosate containing herbicide composition, wherein said polynucleotide comprises a homologous or complementary polynucleotide having at least 85 percent idendity to a polynucleotide selected from the group consisting of SEQ ID NO: 3781-3789.
